United States Patent Application Publication US 2005/0266459 A1 - sequence listing, part 2

SEQ ID NO: 18 - DNA, 175023 bp, Homo sapiens
gaattctttgccaggtactttagggaactgtgaagataattcagtaataaaacaaggctcggccaggcacggtggctcatgcctgtaattccagcactttgggaggctgaggcgggcggatcacgaggtaaggagttcgagaccagcctgaccaacatggtgaaatcccgcctctactaaaaatgtaaaaactagatgggcgtggtggtgcgcacctgtaatcccagctactcagaaggctgagtcaggagaatcgcttgaacccgggaggcagaggttgcagtgagcttgagatcatgccactgcactcccacttgggcaacagagcgagactccatctcaaaaaaaaaaaaaaaaaaaaaaaaaaaaaaacacaaggctcttctcatccagaggtatataggccaacattgctccaatttgtacatcagtagatgtggtgctccataaaccttggacatgagtgcatgagggtgatctgcaagaatttcagcatactgtggtctgtcaaacttgcagagtagctgggtgcccaacatcacattgaagtattcttctatccctgccacaacttcattaacagcatactcattatctgtgtttccacgagattttttgcaatttgcataatcctggagaatggaatccacattcttcctggcagaaagaaaaaagagatgtttttgtctggtaattaagtcccagtcatcaacaagccatggtttcagctcttcaggaatcttcactttttagcttcaactctgttcatgaatgtgtcctcattttcaagagtaggatctacccgggggcccttttcttccaaggaggctgaggcatctcactggtactgccaccatctccatttccaggtattttctgtttgttcttttttgttttcacttcaacattttctgttgcagaccagatgtcttctttcttggggcagcccctctcatcttcccctctgcatactgctcctgatgggctttttgaagttgtttctgcaaattggtgtccacgtatttgagtactctgctctctggaacccatgcatcccaatttttattccaaccactgtaatatataaagtattttacttgtttgtcctttatggcaacctttacacattttgcttcataaagaagcagcccatgaaagcacagcacttgctcaccctcctggaacttagggtttgagtcctgcttccacgtcatttataagtgattcgcagcctcctccttctccagctcattttataatagagatttgatctgttctgtggtcatgtttttctggggtgcttttatttataagagcttttgttttttcctttataataactttaaatgggattttaccttgatacttttctgtttctcttgtctacgtaaaattagtgttcctgaacttttaaaataatgtagagttcaaggtagtttttctaacgtcacagaattcattcctctgttgttttcacataatgttcaaaaacctagtagcttgctttctgagatctactagccgttgatcttcccatctttatctgaaccttctctttccttcccctcctgttttactctattctattgtccctatcctgctcaatttggattattctatcctattcaattttgttttaatcagtgtggtgctctgtcctggatgagcactctggcaggttcatttcagtagttccattttgagagttcgttggggctagactgctctagcttcttctgtctttaccatagtcacactgcacttgcctaatattggagtgggcaaccctcccaccctcctatttcagctgctgttcttaaaataacccaccatcttgtccagcaaatagctgtggctattttggcgttcccctgctttcaagtcttatgagacaccctgttaaatctccctgcttactctcgcatagacagtgataacatggaggtcttgtggctgttggtggtttgcccttatctagttgtgctttcaaatgactaaggctatagtcaactttatccatgtttttggatttgctatctagtttctgtaggttttagttaaaaacaaaaacaaaaaaactatgacatggccacatccatcttcctagactccccctcacagccagatttgaggtcaaaaacagcagttgtttctatattcatcatatacttactttttgacatttaaatttacttaaaaccacattgttatatgtcatttcactcttttttgaaagaaggcaaaaaatactccaactccatgattacaaaaagtttaactgaattctttatatctttcctggttttcaatacttctaaatgttccttattcttagttcaggtaattgacaaatgtttattatactttgaaaaaatcctacagtcaccaaaaactctcatctggtgaggtctcagattgagatcaaaaaccaaaattatcattaaaacacaagaatccaaatataaaatgtctttaaaaatctgaacataatctgagaagaaattccatgtttatgttttacagactttgtcttccttgaacactgaaatgtatggtatatgcagtaggttttctccttgtccagagatgagcaaactacagcccacaggctcattctgctttacaaataaagttttacaccaggtgctatggctgatgcctgtaattctagcactttcggaggccgaggccggtgaatcacttggagctcagggcataagaccagcctgggcaacatggtgagacgccatctttacaaaaatgacaaaaattagcccggtgtgatggcgtgtgcctatagtcccagctactcggaaggctgaggcaggaagatcgcttgagcccaggagacagaggttgcagtgagctgagatcacgctactgcattccagcccggatgacaaggtgagactctgtctaaaataaatacgtaaataaataaataaagttttgctgcaacagtcatgcctattcccttatgcattactatagctgcttttaaactacagtagcagaagtagttgaaccggagatcataagcctaaaatatttactatctgagcctttacagaaaatcttggccaaaccccgtcctagtgtagagttttatcaaagttccattagcaggacttggggctttactggtaattttgagtgggacactctttgttgtactgatgcccagcacactgcaggatgtttagcaaccttggacctcccctccaccaccggaactaaaatactagtagcactcccagtccttgggttaaacaaaattctctacacatttccaaacaaaggcagtaaagatgctacccctggtggagaaccactgaagaactaagttagctcagagtaaggaaagaggaaatacagtctgtaaattctaaatgctatcaagatggatgataaatgtaattacttttaaagcacttttaaagagctaactaaaagactattcttcttcccctctggcacttagtcaaaaataaacatatttcttaataaaattaggctttgtaatgtatcaaggcttcatcgagttttcttaaaagttttttctaattcttgtaatcttaccgatttgttccatccagatttgatttgtggatgaaattaagttttgcatctgcccaataaagcttttgttcttcataatccaaagtcagtccatttggccagtaaatttcactgtttattataatgaagcgacttgaaccatccattccagcacgttctatctttggcacttctccccagtctgtccagtacatgaacctaaaaatcataaaaataattaaagccatgacagagcagatatcaatcaaatactctgtaattattactattaaagaaagctcaggccgcgcgcagtggctcacacttgtaatcccagcactctgggaggctgaggcaggcaaatgacgaagtcaagagatcgagaccatcctggccaacatggtaaaaacccatctccactaaaaatacaaaaattagctgggcatggtggtggtgtgtgcctgtagtcctggctactcaggaggctgaggcaggagaatcgcttgaacccgagaggcggaggttgcagtaagctgagattgtgctactgcactccagcctggcaacagagcaagtctctgtctcaaaaacaaacaaacaaacaaacaaaacaaaaaaacacctcattttagggacactaaaactcttagaaattgtattttgaaattctaatatctaccatttgcaactgccctggtaatacctgattcaaacaactatcatcaaggattcaaaaaccactgaatcaaaatgtattggtaaaaaggatatttacaccatttcaatgtatctccccacagattacttattaacaacaaagaagaaagtgataactttagagaaaataaacccagtggataccaccttaactgagtcatctaaattaacatcaccaataagggaacaaactggcattatatacctcttcatgtgatatacctttacagaacatagtgtcttttatacggtctctcttgcatattattcctgcccccaaaaaatgcataccccaaataaaattatgaggaaacagtgtgattcaagtcgagagacactacaaaacagttggtctttgacaatatcaatgtcataaaagtcaaaaaaaaaaaaaaaaaaaggaggggggggtcaggaaccaatctagactggaggagagcaaagagatatgataactacatcaagtgtatgatcttggactgatgaagtaggaagaaaaaaatgctatgatcactggggagaaaaggcaaaactgatgtagtgtcaaattgcatagtactgtactaatgttaatttcctaaatatgctaattgtattgtagttaggatacagaggggtttgctatactacttttgcttctattccacaagtttgaagacttttcaaaataaaaaatgagaagtctaaaagtctcattacagaaaaagaaatttttctttgatgtaaaagaaaaactctcttgggctgggcacggtggctcatgcctgtaatcccagcactttgggaggtcgaggcacctgtaatcccagcactttgggaggctgaggcaggcggatcacctgaggtcaggagttcaagaccagcctggccaacatggtgaaaccccatctctactaaaaatacaaaaaaaaaaaaaaagttagccaggagtggtggtgggtgcctgttatcccagctactcgggaggctgaggcaggagaatcgcttgaacctgggaggcggagggtgcagtgagccgagatcacaccattgcactctagcctggacaacaagactccgtctcaaaaaagaaaaaaagaaaaaaaaatagaaaaactctttaatgtattatacttctcttaaaagcatattttcaaaagttaatgaggagccaggagtggtggctcacacttgtaatcctagcactttgggaggccgaggtgggtggatcacttcaggtcaggagttcaagaccagcctgtccaacatggtgaaaccccatctctactaaaactacaaaaatcagtcaggtgcatgtaaccccagctactcaggaggctgaggcaagagaatcgcttgaatccaggaggcggatgttgcctcagtgagctgagattgtgtgccactgcactccagcctgggcaacagaataagactctgtctcaaacaaacaaaaaaaaaaaaaaaaaaaaaaaaaaagaggtaatgagggtgctatgaaacagatcaggcacttaataaatgtgttgaaacccaaatgaaattcaggtataagttttactcaaataatcggtggaatggtaatactgaaatgaatctacttaatgcatactgatgtctccactatttcatatgaactgcttactcaaagaaatgatgaggagaatatcatgtaggggaataaatacaccttctagatacaaggcactgtgctaatggcttcacatacattatcttacttaagccttaagcaaccctacaaaatattatttgttcatcaccacattttgatgagaaaactgagaaatgtaagcacatcactcaaagtcacattgctaataaatgaagaacagaaattcaaacctacatctcttaaattctgaagtctatgtgtatgtcatgggtcagagccttgatttttaaagaagagaaagcaaaatgctccctagattggggacaacagtcaaacactacccagaatgagcggtatggacaagattaatacaggataaaactgtggccatgagctgtgtaacaatgtggtcaacaacagactatgtataaaatggtggtcctataaaactacaatactgtattgtcactataccttttctatgtttagatacacaaatacttaccatggtgttatgactgccaccacattcagtatcgtagcatgctgtacaggttcgtagcctagcagcaataagctatcttatatagcccaggtgtatagcaggctgtaccatctaggtttgtgtaacacactatgttcacacaatgatgaaatcactcaacatttctcagaacatgtccctactgttaagcgacacatgactatatataggaaggtagaccagaccatgttacaatttttcattttggccaggtgcggtggctcacgcctgtaatcctagcactttgggaggccgaggcgggcagatcacgaggtcaggagattgagaccatcctggctaacacggtgaaaccctgtctctattaaaaatacaaaaaaattagccaggcgtggtggcagatgcctatagtcccagctactcgggaggctgaggcaggagaatggcgtgaacccgggacgcggagcttgcagtgagcggagatagcgccactgcattccagcctgggcaacagagcgagactccatctcaaaaaaaaaaaaaaaaaagaatttttcatttttattctgagaacaacacaaaggcactttaagacttttaaaattaaaggtgatggccaggtacggtgactcatgctgtaatcctagcactttggcaggccaaggcaggaggactgtctgagtccaggagttcaagaacagcctgagcaacacagcaagatgctgtctctattttttaaaatgaaaaaataataataaaataaaattggaggtgaaatgactggctttgtgttttcaggagggagaaaaaaatgcctgcggtttgggaaaaaactagaggaaaactaaaaaaaatcctgaggccaggtcttccaataggctctgtgagttcagcaaattctctcccttaagcaattaaaaaaaaaaacaaggtcaaatctaaccaccaaagcctccaaaaactgaccaaaggtcatacaacaaaatgagaagcatttattccagaaaaatacaccgcatctcaataagaactgtggtattttagctaggggctattcctatccccatctatactgccaggtttgtggcataaacattctactgtgggcaaacatggcaggccataaagagtggtagctacctttccctgcaagaggggactgaccttatttggaacgaggcatggaaaaatctgtacccaggaatgttgttaaaaacaagagtggactgggcgcagtggctcatgcctgtaatcccggcactttgggaggccaaggcagggagatcccaaggtcaagaggtcaagaccatcctggccaacatggtaaaaaccctgtctctattaaaaacacaaaaaattagctgggcatgatggtgtgcacctgtagtcccagctactcaggaggctgaggcaggggaggctgaggcaggggaatcgcctgaacctgggaggcagaggatgcagtgagccaagattgcaccaccgcacttttgagattccgtcaaaaaaataataataataatattaataataataacgctttcagtggcaggcatcacgagggccattatctaactgactctggtgggggcaagcaacaaaatagcaaactagccagaaatctaacaggaagatcctaggaaaaagactgccaagaagagccttaagtggatattcatgcttagtagtcaggaaggctgtctgcatgtgtaacgctacaccagaaagaacacttgcaagctagtctctggctgaacatgggtcaaatttgaaattgcctaaaattttaagacattctccaaaccataaacaggtccacaggaaaatggggtaacactaacttgctggtgttcaggaacaacctttaagcaatcattagctgaccactaagataacagtgacacagaggcaatcccccagaaagccaggcataagaaatattttaaaaggaaaacagaccacagaagtaatccaggaaagtcattaaacaaaaacacacaacaatggcaacaagcccagggagcggtcagaatccagaatccagtcaatataatatattcatacaatggaatactattcagcaacataaaagaactacttatcaatgtcaaggatgactttttaaaattatgttgaacaaaagaaaccacacataaaagagtacctactacgtgatcccattatatgaagctatagatgtaaaatcaaaaagactaatctatgatgataaaaccagattcacagttactggggaggagtaagggattgactgtaaaggggcttaaggcaccttctggagtagagtaatgaacgtttgtcttaggtgtatttatcaaagcccatttaacaatcaacaaaaaaatatgaattttttgcatgtaaattctaactcagtaaagttgcttaaaacgtgaataagaaacataaactatttcaagaagttaattcaaaggtaacttttcttagaaacctttcccagcttactaaggcaaagttattccctcttctgagctcttggcaggttttgttatatactatagtacttatcagagtttgtagataaactataaagaactcaaaggtaaagactaggtgtcactaccacatcacaatgactggcacattgcacgtattcttttttaaataaagatgaatccagaccttgtgctttccattttcaatttctcctctaacccccaactcagtgcacactgaaatgggtaaaggaagacacatgagatgctacaagaagagaaagaagtacaaaaggttaataacctaagcatagggacagccagaaacagtgaaatggttttgtgtgcctatgtctattataatatatgaactagatttctcctcaggatatctttaatacacaaatcaattgatatttccatcttgatagagtaatacagttaaaaacaagtccacagcacacttcattagccacctcccatcttttctctattaatgcataaaatgaaaactaccagtatctttaaacaaacaagtgtagagaaataagaagttactctcactgcaatatctactaatctatactctgcgccgtgtgtgcaacatgcattacttgagattacgtgatacaaagtttgaaatgttgccatcacaggctgggctgaccagaagcaatttgcacactataaagacagaaaatgcaataagggctattgtctttcttgtacaatataatttaggtaggtttcctaactgtaactaatctaagcatttaactttgtaactcagtgtctagtttatggtgaaataaaatgttacaaatgagtgagtcaacctaacaagattttagtaatgaataaaagtatttgcatgccactatgtaccaaagctaatggataatcccttcattattcaaccctaaaaaataaatcaagtcatgttttttcaaggataagacccagataaagattccaactacaataagtgaaactaaggcatttgtcagatgagaacttgacgaaaattagcatttttaaatagattacagatgtgccttcatttgtgcaaatatttaaaatataaaggaatagatttcatctataaatactaaacattttcattaacttttaaattaaaaagctcattacaaatgtaaccgaaaaagcgattaggacacagaaaatttttaaaaagtattttttaagttaccaatatattattcaattttcttaaggttttgaacacctattaaagcggtgagcacctattaggagctaagcaccatgcctgatacagggaatatgaaaataagcaaggcaaaactattgcccttacgaaattcgcaatgtagacaaggagtggcaagtatattgaggaaggtataaacaggaggctctgagagtatagagaagtgacacccaatcaagtcaatgaatgtaagagttgtcaataaaatataccagagaaagtatgtattttacttaggcagttgccaaaatgggaaatagtgttccaggaagaggacatagcatatgaagtcatgatatattcaataaacagcaagaagatccatagagctgtagcatatcgtgaggtacattgacaatgaaagaaatcccacgtgtattattttactatactaagaaacttggactccagtgacaataacattgagggactggctagaggaagaagaaacaagaaaaagccagaaaactgaaatattccaaataagaactaatgaaggcaacagaagttgaggactggatcaatatgaaagaggaatgagaaaggatagactaggatggctcccaagatttacaaatgtgaatgtgtgtgtattggtgtcattcaacataatatggaattagatgtggtttgggagagcaagatgatgagttcaaatatggatgaattgaagcatcctcacctcattgtttttccttctgtatccagaccaccagtcaatagaataacaggaaaatcagtgtaaaaataagtgaaagttggttagaaaaggtaaataaagtaaaaagcatattaacagtcaaagaagttggtctacagtaacagggcaaaataaatcacaattacgagttgcatatgaaactaagtcaatccagaagtgttgagccatgctaattctaagaacattaatgtgacacatgtaagtaactctgaaaggacctataaaaagccacaggtcctcaaaaacattttgttgccatcaaatttattttgggggaaacttcaaaaatcacatacatcattatcaaattgaaaatgcagccagtgaaaatagttctgattttaatgtgaaaaagaaaagtgttgtgtaaaattcacacccttcctgttactaacccctgaacttgattcctgaccccatgttcctctcttactccggttagtagattaggctttaagtgaagaggagtttgaagaatttacggatttctgcttcctaatagaagtgaaaagaaaaaaagaattgtgaagaaatcggacctacttctgcacttcccctctacttgatcatgtgttggtatcatattttaaaaacaagtagaaattaataaaagaggatagtgaaagcattcatgttagcaggttggtttctgtggttgtttttacagagaatatacagtaaccagataaaagagtctgggctgggtgcagtggttcacacctgtaatcccggcactttgggaggccaagatgggcggctaatgatgtcagcagtttgagaccagcccggccaacatggtgaaaccccaaaccccaacttgactaaaaatacaaaaattagttaggcgtggtggtgggcacctgtaatcacagctacttgggaggctgaggcaggagaatcacttgaacctgggaggtggaggttgcaatgagccgagatcgtgccactgcactccagtctgggtgacagagcaacactccgtctcaaaaaaagagagtctggaatggaattagatagacatggtttgggacggtaagatgatgagttcaaatacggacgaactgaagcatcctaacctcactgtttttccttccgtatccagagtagggatggctttgtcatcccatgtttttacctgtccctcaatagggataataattctacctaattacttgcttgtgacagtatgcatcatcatgaaattctgaatgtataaactggttgccctggagaaaataagaacctcatgaacagccttaagcacccagtctagtcgattacttttaaaaagttagtggacataatgcaaagaatatatttaattcagaaataacattggtaaaccactactagaagataaagattataacctgaaagcgggtaacagattacatcaatttaattcccaactatcatcaaagaaaatgctaactctagtaatttttcaaaattgctgttatacgtcattcctctttccaaagaatcaaaggtgatgcattttgagcgcctctaagtttaataaaaatgaaatattaactgtcaggaatgcccccttcaagcatactctcctctgtgctcctgcacgttattctgatactatgctccaggtacaaactacatctctgtacatttcaaatacagtattaggactgtttactcatatgttttcaccactctagattccaggtccttgaaaacaaggactttgttttattttttgttgtatcccctatcctaaaacaatctagcataatgccaagtacacagtcagcactcaaatatttaataatggtctgcactcacctgctcgtgagacctcttgtatctgtcttattaccaaggccgtatccttgaaaaatacaggtaaaattttattttaatgattacattattctactatgctccagttatgagctgcttttctttgaatgcacaaaagcatgaagagagcctgtcacataatatttctactgactaaaaattattacccacttccacaccttgtccctctagccaacaactgctcggctaacaagcaccaccctaaaatagtgcatccccaccgcccccctgccaagtaaaagtgaatactctgtcctttgtgtccccaccatacagatttccatagcaaaacttatagtttcactggtttattcatgattctatataatcagtctctttatatattttgcaactagtttgtctcagaaggtatactagaatatcctgtcactcaaatctggaagctatatatgcttcactgactttttcattaaatggtctcatagagagaattttattttttttaaggtaaatttatttcagtcatgctctatgagaacttcaactacctttctaataaatacatcaaaattagtttctgaggaaaattttgtccttgaccttgagaattcttggtcttgagaattagaacttatccagctcacctcacctgctttaactgaattgcactttgcccagatgccgcagggacaaatgccaaagaaatgtgtcactgtggatattataaagatattgttgaatatatttttcattatatcatatagcagcttctttagaggactaatgggaagaaactggtttcatcatctggagtaaatatttttttcagtgaacagcttttatctaaaggacattaactcatacctgatactttcttccctaaggaatctggcttaaaatcaaatgtgtgtggaagtatatgggaattaatgacatatgttttggtatgtatattttcactcctggtctcatcttacatgtatactcttatatttccatctcaattttaaaattttattttataaaattaatacatttatttattttgcatcacttttttatatcttcctaaaacatcttaaatccttttagagacaaagtaggaaaaacatttactatttttttcagtttagctattggggattaaacatttttcttattaatttgtatgcactttttatatatcaaggctaactctattattaatatatctgttacaaatatttttctttgtctttttttgcttgaatcaaaatttggttgaatcagtatttttctttgcaatttctttcattgctttcatgcttaaaaagcccttctctcttcaaagattaaacattcacgttttcatttgatgtttaagttttcacttaaaaatttttatccatctaaaatgtatctgaagtatgacatgagatactgatataaactgattttttctttcctaacggtaaattcttctagtatgacgtcccttccctcttgattcccactccttttatcacgttacaaattgtaacgtacagtattttcctaatctacttgtttaatatctattttttacaccaataatgtctcatagatttaacattagctctattaataccagtcttggataatcatgtgaccatagttttaattttcatctgcaaagtgaatacttcactagttgatgtaaggattaaagtaagacactttatataaaagaaaagtgtctttcctactggctttgacccttctgctctgatctggttgcaggacagttcttcatatttatcatcttctcttagacttttaccattacccaccccatggggtcttttagtcatctaaactccctgctaatacctattttataacagtaaccaaccaagaagccaagcagcaccccactctcaaaacacattttcaaaaatatgtcataagtaaaagaatatttattggatgcaggtatattacaagagaaaatttaggacaaaatagcatttactcaacaagaaaaaggaaattttcctttattctttaataaaacatctcagttaatatttacaagcactggatacaaatacttcctttatgttaaacctaacacccccttaccagtaaagataagcttccttttcataacaggtgaatacaatgtgccattcaaaggcccagtcagcttactaaaaacccattcttcagatatctcataaatcaactatgttatatagtaagaacctgaagtctttaatcatcataaacacattcctgcaaaataaatacataagcttaattcttaaaaggcaaaagcttaaaattcatgatctgatttgtaaaatatgctaagactaatcttttggttgcatttatttgaaatttctaagtcatgtgagaactttctttttcctttaactatcagagcctatttctgtaagcaagcatagaaaaaatagttttcctggttgggggaatatggaatgcgttttctccatttgaaaccaacccattagttccctagataggttttggataaacatagaagttgacccttctggtcttaaagcttgaatcttacatttgttttacctgagttccttcctcaggaaatgaccttcaggctgctcaaagtatcaaataactgaaactcaccagatcaccacattcagacagacaataagatgctagacaactcattcatcatgattgcttccttggcccgccttagttcctgtttcttttacatttcttccctgctatatgaacccttcgttttagtcactcagggagatggtttgagactgagttctcatcttcctggctgcagcacccatggcaatacttgttgtctcagtcactggctttctctgcagtgagcagcatgacctagaccaaacccctggtgttttggtaactcatttttatttgcagtttctgacatccttacaaataaacataaagttaacatttttacaaacacttcctaataaggaaaagtttgaggagggaaggacatcacagggaaataaatatcacaggttctcccactgatccctgagatttgaggggacagcaaactgtgcagaaataatgaaaaaaaataataaaaatagtctgataaaaacagtactgttgtttactattactaatggccttaatcagtaaggactaagattattttattttattttatttcattttgagacggagtttcactcttgttgcccaaactggagtgcaatagcgcgatctcggctcactgcaacctctgcctcccgagttcaaacaatcctcctgcctcagcctcacatgttggccaggctggtctcaaacttctgacctcaggtgatccgcccgcctcggcctcccaaagtgctgggattacaggcgtgagccaccgtgcctggccaaggactaagatttaagatttcagtagacagtgttttcaggtattaaagatcagagttttcttttaagaatctatttgtggccaggcgtggtggctcatgcctgtaatcccaacactttgggaagccaaggtgggaggatcacctgaggtcaggagttcgagaccagcctggctaacatggtgaaaccccgtctctactaaaaatacaaaaattagccaggcatggtggcgagcacctgtaatcccagctacttgggaagttgaagcaggagaatcacttgaacccacaaggcagaggttgcagtgagccaagatggggccactgcactctagcctgggcgacaagagggaaactgcctcaaaaaataataataataatgatctatttgtgtgatagactaatgtatctgcctaattgcttcatctttttcaaaatcttcaaagcggttatggtcttctatacctctcctctggtcctaattcgctgcaacagacttttacttcactttcttctgtcttaattaaatccacccacagacacacacaaacagggagaagacagaaagatttggagacccctctatctatcataagccaaaagctattagatttctgaatgtcctggatcttccagcacatttcaaagtgactttgttacccacaatggccataatgcaacattgttttataatgatttaaatttgaggttttaaaaaatgataataatatagccaattatactttttattcagctgaaaaatatgagggcctgaaaacaatgtaaatagtatttgagaagagaagacaaatccaagagctacttagaaggcagaataaacaagaattggtaactgattaaatgtgaggagtgaggaggtgggggcctagaatgactcaggatttttagtttctgcaaccgttaggtagaatgacagttgttcacaaattctgatattttgttatagggttttcttggatgtggtcttctctctgtacttaaaatttaaaaaaaaaaaaaaagaaaagaaaagctttgttaaaggttgttttctcaagccccaataaaactaacggataatccaaacagcctctttccagacttcccatcccctacccttaaggccattttccagaatactctgaaattaatgattatattaccaccacatcccctcccacacaccctccccctccctccccctgcccctgcaatctgggattatgtaatttccttactttcagcatgaatcccaaacttcttagcatgacatataagagcctttctaatttgtttctctgcttttggttcctcatttctcacggctctagtatcctgcctattgctaccagactgcctttcataaaatacagtatcatgtaaacacaaatcctttataactggggtccccaacctccaagccagagaccactaccagttcatggccttttaggaaccaggtcacacagcaggaggtgagcaacaggcaagtgagcaaagcttcatctgtatttatagccgctccctatcgttcatattactgcctgagctccgcctctgtcagatcagtggaggtattagattctcataagagcataaaccctattgtgaactgcgcattgcaagggatctaggttgcgtgctccttattagaatctaatgccttatgatctgtcactgtttcccatcacccctagataagaccatctagttgcaggaaaaaaactcagggctcctactgattctacattatggtgagttatataattatttcattatacatcacaatgtaataataatagaaataaggtacacaataaaggtaatgtgcttaagtcatactgaaaccatccctccagcccagtccgtggaaaaactgtcttccacaaaaccagtccctggtgccaaaaaggtaagggaccactgctttacgagacactcttagctttaaaagctatagggactcagatttccctattgctaaacatactacaaagccacagtaatcaagacagtgtgatactagcataaggacagacatctagataaatttaaaagaaatgaaaatccaaaaataaacccttatatttatggtcgattgactttcaatgaggatgtgaagacagttcagtggggaaaaacagtctgttcaacaaatagtgctgggataactggatatccacatgcaaaacaatgaagctggacctctaaaggacatacagaaattaattcaaaaacgataaagacctgattgtaaaagctaagaccataaaactcttagaagacaatgagtaaatattcatgatccagaattaaaagaatggtttcacagatataacactaaaaccacaagcaacaaaagaaaaaaacagatcagacttcatcccaaaactccattatatgtgtgtttcaaaagataccacaaagaaagtgaaaaggcaacccacagaacaggaaatcagtatttgcaaatcgtatgtccgacaaaggtctggtttccagaatatataaagagctcttagaactcaataataaaaggacttaccaggcatagtggttcatacctatagtcccagcgactggggaggccaaagtgggaggaccacttgagtccaggagttcaagaccagcctgggcaacataacgagaacccccatctttaccaaaaaaatttaaaaatttgcctggtgtggtgtcacccacctatggtcccagctactcaggaggctaaaatgggagaatcgcttgagcccagggagttgaggctgcaatgagccatgatcatgccactacattccaggctggggaacagaccaagaccctctctcaataataataataataataataataataataataataataatactatacaattttaaaataggtatttcacaaatcaagatttacaagtggtcaaagcacagaacatgttcaacatcagtcagtaaggaaatgtaaatcaaaacctcaataagacatgcctatacacccactaggatggttataactttttaaaaaaggagagagggccaggcacagaggctcacacctgtaatcccagctacaaagaaggctgagaagggaggatcacttcagcccaggtgtttgaggctgcagtaagctatgaccatgccactgtactccaacccaagtgacagagcaatacccccatctctttaaaaaacaaaaaaccaggaagagacaaagaatagcaaatattgcaggaaagagagaaactgaaaccctcatacactgctagtggaaatataaaaatggtagagcaagtttaaaaaacaatgtggggctgggtgtggttgctcacgcctgtaatcccagcactttgggaggccgaggcgggtgatcacctgaggtcaggagtttgagaccagcctggccgacatggtgaaatcgcaccgagatctcaccactgcactccagtctgagcaacacagcaaggctccatctcaaatacaataaaataacaacagattacttgtagggcccactttagttacaaattttatactcttaactgtctacccctttttggtttttgtttgtttgttttttgagacagtctcactctgtcgcccaggctggagtgcagtggcaccgtctcggctcactgcaacctccaccacccggggttcaaacgattctcctgcctcagcctcccaagtagctgggactataggtgcccgccaccacgcctggctaatttttgtatttttagtagagatgaggtttcccatgttggccaggatggtatcggtctcttgaccttgtgatccgcccacctcagcctcccaaagtgctgggattacaggcgtgagccaccccaacaggccaactgtcctccgcttttgtatctaccattgcacctcattcatttttcaacattagaaagggggaaaaaatacaaacaagactcaaatcacagcaaagatatccacaaatcctgtaaccattccctttcattcacaaaatgttctttcatggatatatggcactggagggggctacccagctttatcgaatccactttcctatgtttggagaattcttcactttataaggcagaaccttgccctaaaactaaagaaactgaaaaccaggtatttgctttccacatctctctcctaactgggacagggttacgtgtaagtcctgagcttttccagtcagacaaaccaaccccgactttgaaaaactgaatcaacaaaaggaggaggacgtagaggtcaaagaggaagcagcgacagaagcaagccccataagcaatccattctggtgaggttgaaggcaacagcaacagctaatttactccagtttgaattaattaatccttccagctgggcacggtggttcacgcctgtaatcccaccactttaggaggctgaggcgggcggatcacctgaggtcaggaattaagagaccagacaggccaacatggtaaaaccctgtctctactaaaaatgcaaaaattaaccaggtgtggtggcacacgcctgcagtcccagctactagggagactgaggcaggaggatcacttgaacccaggaagcagaggttgcagtgagctgagatcatgccactacattccagcctgggcaacagagcgagaacctgcctcaaaaaaaaaaaaaaaattcttccttcatccagttttaaaagggaacactgacaacagttttaggagtatctgtcaccttatgtcagagaaagtacaaatagtgtgaacatgtcacctaacagtgatgctttcactggaccagctctgcagtatagtacgtagcacactgttcctgcacaagactggttcttctaccctttaggaaattctatgaatagcccaatatcctctttaatcacaaagccatttatgattaaagtagagggatttctattatttaagactatgaacactaacgcatatttttcttagtttttttttttttttttgagacagggtctcactccatcacccaggttggaatgcggtggtacaatctcagctcactgcaacctccacctcctgggctcaagcgatcctctcacctcagcctcctgagtaaatgggagcataggagtgcgccaccacacccggttaattttttctatttttaggagacacagggtttcaccacattgcccaggctggtctcaaactcctgagctaaagtgatccgcccacctcagtctccgaaagtgctgggattacaggcatgagccaccacgcccagcctaacacatattcttagatcacaacggcatcccaaagcatcactttaaagttcagataaagtaacttcaacccttgctctgacaaagtttcgtatcttacaactccctaccttctacaagtggcatgtttgcagtctcagttcttcccacaatctactatgacccctctctccttaagaaccaatgtcaatattcgtgagactggttagcagaaaactgtcagctaaatcacatcctgacccttctttctgtacacacatttaaaacaacatcttgatgcaaactgatataaaaggaacaatttattacagatgcaaaagccaacttaacattaaacttttgtatttatatcaccataaacaatgaagtgtaagagaaaacccaattgaacagtttggttcacccatgccttcataacttcaaaacccaataatcatcaatacataatgatgacaagataaccagttcttgaatattaagaaactagaattgttgctttagcatgtttaagactatgcacctcccccctcttccctctctgacacacacacacaaaataacagcatcaacagcatcagcaacatcatgaaatacctacaacaaaaaatttcaaccctggcagcacttgagaatgacctaagaaatttattttaaaatatccattatgtgggttctttcatcagagattctgattcaattggtctgggctcgaactcaggaatcaatatttttttaacagcttcccaaggaattctaatgcactcacacagggcttagaaccagtgaagaggaacataatgttctcaagcacctgtttatccatagcattctattcttgcacagctggtgttaatgtatttaactcattaaccactgaccctaaatattagctaatcattaagccccagttggtactcgcctgtgtggaggttaccacatagtctgggaggatgacttaaaatattttattttggtgttggactgtgtcatctataattctggcttcagagaacagagtaaaatatgattgagatttaattggtggtttttctgaattgatctaggagtgatctgctaaatgctttatgtacttatacccttccactgtgcaagaccatataggggaacaaagtaacaactaaaattccttctcacacaatgggtttccacatttccttcaaaagctctacaaattgggaagggggatttgaaaagttcacaagtactgcttaaattttactaagcagtaaattttactaagtaaaaatacacacatctgtgagaataaaagtagattttcaaatttccactataacctttcaagcttttggcacccaattttatatatttatagcgataatcctctatatataaagaaagatcacggccgggtgcagtggctcacacctgtaatcccagcactttgggaggtcgaggcgggcggatcacctgaggtcaggagttcaagaccagactgaccaacatggtgaaacctcatctctactaaaaatacaaaaaaattagccggtcgtcgtggtggtgcctgtaatcccacctactcggtaggctgaggcaggagaatcgcttgaatccaggaggcggaggttgcagtgagccaagatcgcgccattgcactccagcctgggcgagaaagcaagactccgtctcaaaaaaaaaaaagaaagaaagaaagaaagaaagattccattcttgcgggggaaatattccaagacccgcggtggatgcctgaaactgcagagtaccaaaccctatatatactatgttttttcctatatatacatacttatgacaaaagtgtggtccatgaaccaatcaagctccatcctacatctacagaatcagaatctgcactgtaataagagaataaaaccaaaatactatctttccttacattagtctttataacatcagaaaatacatagtaaatgtatagtaataaaagttacatatacaatcctaaaaataacactaacgaatatttctaggataagtatataaagcatttagcaaatcactcctagaccaattcagaaaaaccaccaattaaatctcaattatattttactctattctctgaagccaaaattatagatgacacagtccaacaccaaaataaaatattttaaatcatcctcccagactatgtggtaacctccacacaggccattagttaagaatagtaacaattataaagatgttccaaggattttaagaaatacctccctaattatttcactcaagttcttcatttcatcagaaaaaaaaaaaaaaaaaaaccaggacctaagacctgaattttcccaaaccttttagatgcatgtgatggtcatttatctgagcctcccagaatgactgggaaatgaacatcctacaagtcttgccacaaaccaagtgtttaacagaaaattaggcacaagtattagctacactgaaaccttgttgctgtgtttccccttgggaatgatggctaaggtagaaccataccgcacatatttaaacaataatttacataaaattacaaatactgtaaaatacaaccactactcttatgatgaaggaatctgcacttgtttatatcaatacaatctttcatcttgagggtcattcaacaatatgactggtaatacataggtatgggcctaacaccctcccccagtctgtgagatctgacaaatcctacagtattttttaaatcaaatgctaaaaatattaattatacttttctactactcctatcttaatttttaatgggtataaattccaaggctgagattatttttcattgttttaaggttaatcaactaaccttatttaaagtgtacactgtatatagtaagctaaacatggactaaacgctgatgtctccaattctaatcctttaccacatggatcactctagcctccttctccttgcttgtaactttccattccaacagtgagaaatctggctaccacaatccaccatccacttatacttaactgtttagtatacattactagaggtatcagaattgcagtatcagaattgttaactatacctttatatgaagcaatattatcaaccaatgtacactacaagtaaagaatatgtgcagtgccttttgcctttagtattacaggcactatgcatctccaaaattaattagatcaacagttttcccccatcacccacttcaatgaggttgttttatacatctctaatacaattagattcttctgtctcaatctgcattccatcctggaatcccccagcctcctaaaagatggtcttttaaaattcgtattcattaaggtccacgctttctgctataaagtgctatgggttttgacatctgtgtagtatgcttttttcctgtttctcatcttctacatatataacatcttacaaacaattttaccaccattcttcaaacaaacatacatacttccacagtcatcttcaattctactaaacagtacagtctacatgcttgcaggcttatctccatgcacataccacctttttttttttcccacaatctctaggagactcatttcagaaaacttcactttcaagattactaacagttgtctgctcatgattaggcttcaaaagaaaaatgttaaatttatttatatagaaaacagatttcatatccttattttacaaccgagttctctaacacttatgtgtctatcaaaaataaattaatgaaagcttgaaaacagttatgaattcattatactgctttcacatccacttcaaacttcctatatataaactgatataacatgggttcacttacccagctcagtctcactataaggatttttaaacaaaatcagtccagtccactgaacagtatcagcttactgcaggtacattgtctttcataataaataacagtatcagtaatgcaataccaacacacagggaactagactaagaccaaggatataaataaggtaagaacatacctattccctggatgcctgcctgaatccaaattaaaaccttctgaatggccaggggcggtggctcacacctgtaatcccagcactttaggaggcccaggcaggcggatcacctgaggtcgggagttctagaccagcctgaccaacatggttaaaccccatctctactaaaaatacaaaaattagccggttgtggtggcaggcacctgtaatcccagctacttgggaggctgaggcaggcgaatcgcttgaacccagtgggtggaggatgggaggatgcagtgagccaaaatcacgccactgcactccagcctgggcgacaaagcgagactccacctggccggggtggacgcagtggggaagaagcttggaaatcgttactctatcctaatagtgagtaaaaagctaaacaacaacaacaacaaagatcaacaactcttcttagatccaccagagaagtaaggtcacagggcaaaccactgcccccacaattggatagacagacaaggtgataacaaaggatcataatttatcaaagcagaaatccacagacaaaaacctctctacaggagccagcacccgagtaggaaaacctaaattgcgattgatgacttgctggaggcttagtatagacaaatctgaaagttaaaaactctagggacactttttttggttttacctccaggagctctaccaggttctcacagtaaagatccaagccagtgtggtggctcactcctgtaatcccagcactttgagaggccgaggcaggtggatcacttgaggtcaggagtttgagaccagctggaccaacatagtaaaaccccatcgctactaaaaatacaaaaattagctgggcatggtggaggacacctgtaatcccagctactcaggaggcagaagcaggagaatcgcttgaacccgggaggcagaggttgcactgagccgagatcacaccattgcactctaacctaggcgacagagaaagactgtgtctcaaaaaaaaaaaaaaagagagagacctgagaaaaatacccactgctgcctgtgcaaggagagttcttgtaaagctatagtactggtaaggtctgccctcaagaaaatccatcttactacagcctaaccaacctgggggaaggaaaatatccagctccacctccctctccccgtctacacagaagaagagaaatacttaactccagcctcctctaaccattctgtcccacctaaggggatgaaaagaactgagaagcacttgtgaagctcacagcccagggcaatggctgactaaacaactgaaatatagtcattgaactatagactattttttctctccccacagcttaccatcacattacaaaaggcctatatatcacaattccttttatctgatatatcatatccagctttcaacaaaaaattacaaggcatactaaaagacaaaaaagcagtttgaagagacagagcaagtaccataaccagattgaaatatggcaagaatattgcaataaacagacaagaatttaaagcaactatgattcatatgctaaggatgctaacgggaaaaaacagacaacatggaagaatagactgataatgtaagcaaggggaaaaatcaaagagaaatgctggagaccaaaaacactataacataaatgaagaatgcctttgatgggtttattagtatactgttcatggttgaggaatctgagcttgggaatatgtcaatagaaacttccaaagctgaaaagcagattttttaaaaagactgaaaaaaagggaacagaatatctaagaactgcgttcagttcagcagcacatatactaacactggaacaattcacagatcagcatggcccctgcacaaggatgacatgcaaattcgtgaagcgttagtatttttataatatatatttttaaaaacaataagaactgtgggacaattattatacaaaaggtacaacatacacataatgagaatacagaaagagaaaatatttgaagccgtaatgacagaattccacacaaactaatgtcagacagcaaaccacagatccagtcagctcagagaacaagcgggaaaaggcaaaacaaaaccaaccaccacctaacaccttggcatatcatattcaaactgcagaaaatgaaaaaaataaataaatcttaagcaagaaaaaacaccttacttgtagaagagcaggattacatccaacttatcctcataaaccatacaagcaaatagagaatagagcgaaatattttaaaattcaagagaaaggaaaaacaaagaaaaaactgctagcctggaattctctaccctgcaaaattatccttaaaaagtgaaggagaactaaagactttctcaagaccaacaaaaattgagggatttgttaccagtagacctgcgttttaagaaatgttaaaagtagttcttcagaaggaagaaaaataatataggtcaaaaatagatctacaaaaagaaagtaacggcattagagaaggaataagtgaaggtaaaataaaaactttcttttcctttttttttttttttgacacagagttttactcttgttgcccaggctggggtgcaacagcgcaatctcgcctcactgcaacctccacctcccaggttcaagcgattttcctgcctcagtctcccgagtagctgggattacaggcacgcaccaccatgccaggctaattttttgtatttttggtagagacggggtttcaccatgttggccaggctggtctcgaactcctgacctcaggtgagccacccgccttggcctcccaaagtgctgagattacagacttaagtcaccacacctggccttttcttattcttaattgagctaacaggtaacagtttgttcaaaatagtaacagcacagtgtagtcaatgattttagcttatatataagtgaaatgaatgatggcaacaatacaggggatggaagggagaaattaggagtattttgtttcagccaattctgttgtaagtccaaaactgttctaaaaaatggtcttttatttaaaaaacaaacaaaaggcaagaggggagccctttctgcttcagtttgctgttctgtaaagcttggcactcatttttagtggtcagtggtcaataagactggtaccaaatcctcatttggcacatttccccgagagtagctaaattatgtatccaaggtaaggattaagaaagagagcctggccaggtgcagtggctcacacctgtaatcccagccatttgggaggccaaggcagggggatcacctgaggtcgggagctcaggaccagcctggccaacatggtgaaacccccgtttctactaaaaatacaaaaattagctgatgcacgcctgtagtcccagctactggggaggctggaggcatgataatcgcttgaacccgggaggcggaggttgcggtgagcccagatcacaccactgcacaacagcctaggtgacacagcgaggctccatctcaaaaaaaaaagaaagagaacctaacaggaagagataaatgctatgcctaaaaggtaacaagtagatgtcttcagtttatgcagtgacccagcagcagaatgagtctttagtctcaggatctgctttatgagactgtgcccttctctagtgcaggggtcctcaagccccaggctgtggaccagtagcagtcagtggcctgctaggaactggccgcacagcaggtgagcagcaggcaagcgagcattactgcctgagctctgcctcctgtcacatcagtggcagcattagtctcaggagtgcgaaccttattgtgaacagcgcatgcaacagatctaggttgcacacctccatttgtgcatctaatgcctgatctgaggtggcacagtttcatccagaaaccatcccacccaccccgctactgcccagtgcctgtggaaaaactgtcttccacagaaccagtccctggtgccaaaaagtttagggaccactgctctagggaaagcagaaaatggcaataggccccagcgagctaggaaagaggcattcattgcattcaaggatgcagcactgaagctaacccaagaggagtggtagctactgaggcctgctcagaggacatggtacagggatgtgatgcaggaaaagtcctgagggaaaaaaacattctcaagatctgctaggatatgacacaaacattttctattatgaggaaaatgaagaatatcggcccggcacaacggttcacacctgtaatcccagcactttgggaggccaaggcaggtggatcacctgaggttgggagttcgagaccagcctgaccaacatggagaatccccatctctactaaaaacacaaaattagcctggcatggtggcacatgcctgtaatcccagctacttgggaggctgaggcaggagaatcgcttgaacccgcaaggcggaggttgctgtgagccgagatcatgccattgcactccagcctgggcaaaagaagtgaaactccatttcaaaaaaaaaaaaaaaaagaagaagaagaagaatatctcacactgagacttgaaaatctctcccttaactcagccatttaaaaattaaactgtgacataaactccttgactacttcattttattttagactctttcaaaaaataaataataattggtgtgcaaatattaaggagcaggtttggttgttttgtttttgtatttaatctaccttagaatctaccttagaaacctgtagacacataaaagcacttaacaatgaagttgcttaattcaactagttgtgtaatatattctgcaagggcttttatcagcaacatattttaaagccaattttagtatgctttgggaaacagaaagtgtgtgataaatatctcccttggcttctcaaaagctaggctacaggcttatatagaagaaatctcacttcagcagtaatctttactaactctggttatgtaatctatttggcctctaatttattttggcctcaattagctttattttggctttgaattaagagagaatgaacatatgtacttgataatgattaaataaatatatgtggtcacagctccactttgcaatagtatacacatctgctattcatccaaaaatcatgaaaaccaggaccaggctgttatatgctgttcattagcgtccacacaaatgtaattttattgctgtgtctggtctcatattcatttgtaatgctttctggaaaataatttttaaatggagtgaaaggtagaagatgagcttcattttaactgggagggaagtaaagcaagtaaacatatattaagttttcaagatgtcacaatttcttatgccaggaaaataaaaatatctcaaactgataataagactagacacacaagccattttatacaaatttactttatacatttttattacaatccaaagcatttaatttatttgattaggtaaggataaaacaacaaatcttccaaaatattcacaagccctaatttggtaagtatactcaatctgaattcggcttcccataatgaaaatgttcagtttcaataaatctagactaaagggatgaaatttcaccctttacaagatgtaattacatacacaggtgactaattaagacattgagacttgagctataaaaactaagtgacccagatctatactagatcataaatcatgtcatgatccttgaagttacttatataatcctatccataattaaaataagtcattaatatacatattagcaagtatgaataatcctcaactatcatgcacatggtacatgaaagaatagacaatattttaaaacatgtaagtcagagtttctattctggtaatatggtaaaaagacaaccagaaaatacttcttttacaaaacatctagaactactggtgaatctttttatttgatttgtacatatacacaaaataaaatatacaaacacccctttaaatgtagaacttatcaagaaagtaggagaaatctcctgagaccaaaaatgaacaggaaagtaaaaagcagtacatggccaggcgcagtggctcacgcctgtaatcccagcactttgggaagccaaggtgggcagatcacaaggtcaggagttcgcgaccagcctggccaatatggtaaaaccccgtctctactaaaaatacaaaaattagccgggtgtgatggcaggcgcctgtaatcccagctacttgggaggctgaggcaggagaatggcttgaacctgggtggcggaggttgcagcaagccgagatcgtgacactacactctagcctggatgacagagcaagactccatctcaaaaaaaaaaaaaaaaaaaaaaaaaaaagcagtacatgtttgacctgatgctatgacgaccctggattttctgatttcagaaactgagaaacttctgttccaatgacaagccagagaagatcttggcacacaagacacagtgttagaagtaagattcctgcacaaagcatggactctcaaagaacaatgaagtagaaagatctgcccactggcagagggacacaggaagccttttttgtcttgccctaggctctgaaaaggtaggaaagatcaccaaagatttcataatcataagactgcccctacataggtttagagtttgatttattctatccacatagtacagaaactcccaacttcaaaaattaaatataaaaaatgacttctgcttgaataaggcaatgataacatttgataactcatttaccaaaactcaaactaagccgggcacagtggctcatgcctgtagtcccagaagtttttagatcagcccaggaaacggttttttttttgttttgtttttgtttaaacaacaacaaaaaaaactcatgctgagcagcgcagtggctcatgcctgtaagcccaacactttgggaggctgagatgggcagatcacttgagcccaggaattcaagtccatcctgagcaacatggtgaaaccccatctctacaaaagatatgaaaattagccggatgtggtggcacacacctacagtcctagctacttaggaggctaagatgggaggattgcttgagcttgggaggcaaaggttgcagtgagctgagactgcgccactgacgaagcgagaccctgcctcaaaaaaaaaaacaaaaacaaaaacaaaaacaaaactcaaacttcacacttgagatctgtgcaatttactgtatataaattatactttaaatagttaagtggtcggctgggcacggtggctcacgactgtaatcccagcactttaggagaccaaggtgggcagatcacgaggtcaggagatcaagaccatcctggctaacatggtgaaaccctgtctctactaaaaaatacaaaaaattagccgggcatggtggcgggtgcctgtagtcccaggttattgggaggctgaggcagaagagtgtcgagaacccaggaggcagagcctgcagtgagccgagatcgtaccactgcactccagcctgggcgacagagtgagacgctgtctcaaaaaaaaaaaaaaaaatttaagtggtcactggaaacacttccagtgaacttggcaaaagcaacccaaaatctctctggaggaatatgcccccaagtcattcagaattctcaaggacagcctctctgaagatctgttcacagtccaaaactatataaaacactcgaggaaacatttaaccttaagcaagaatccagcaggtgcaaaaaaaaaaaaaaacagaagtagatttttaagaacttcagaaaactgaacaacttgatagagattataaatatttaaatgatgaaaacacataaaagatggaataaaatatatgacacaagaaaagacatcatcaaacaataacatatctctaataagaaaatacaagaagcaatcctcagtgcatgctaaaataatcaatagatgagtggttaataaggaactaggtatttggcaaaatacaaaaggatcatcccacaaataacttaaggacacaagaggaaagggctcaacttacaaataaagatagtaactttcaggcactagagtcaaaaaccaaatattataacaaaagatgcacctaacatcccaactgctcagaaaatctgaccatctgaacctactgaataatcttagcaacactacaatataggacaacttctgatgtgacaaatacaaagtactcagtactacctatgaggcattcatgtcaaaatgttaaatctgtctctaatcaagtcttcaaatctttctttccaagtaacacagggggataaaaataagtcaaataccacaataatttgttagaaaaaaaaattgtctgggcgcggtggctcatgcttgtaatcccagcactttgggaagccaaggtgggtggatcacaaggtcaggagatcgagaccatcctggctaatgcgctgaaaccccgcctctactaaaaatacaaaaaaattagccgggcatggtggtgggtgcttatagtcccagctactcaagaggctgagacaggagaatggcgtgaacccgggaggcggaggttgcagtgagccaagatcatgccactgcactccagcctgggcaacagagtcagactccatctcaaaaaaataaatgaatgaatgaatgaaaataaaaaatctgggatattctataggacagctgacccagtcttttcaattaagtcaacaaggtgagagataaaaagggaaagggggaggaccaactgaactgctctagaaaaaccacatacaacttgtaaaccaaatgtttggactctgatttcaaacaaccaactataaagcaacatttctgagacacagatatctgagtatgaacagactaatttataacattaaagaattgttcatcgcaagttgtgtgaaagacagtggcattatgattctagaaaaaatattttttagagatggaaaataaagtatttacaagtgagatatcgatgtgtgaatctgctttaaaatatctcagctaattaaaaaaaaaaccagcctaaaagcctacacatagagagtagttgaataaactatggtacactcacacaatggtatactatgcactggcaaaaaacaatgaggaagatctctatgaaatgatatggaatgacattcaaaatgttaagttttggccgggcacggtggctcatgcctgtaattccggcactttgggaggccgaggcaggcggatcacaaggtcaggagtttgagaccagcctgaccaacatggagaaactccgtctctactaaaaatacaaaattagccagacgtggtggtgaatgcatgtagtcccagctactcgggaggctgaggaaggagaattgctttaacccaggaggcggaggttgccgtgagccaagatcgcaccattacactttagcgtgggcaacaagagcgaaactccatctcaaaaaaaaaaaaattagcaaggcatgatggcacatgcctgtagtcccagctacttgagaggctgaggccaaagaatcacttggacccggaaggcggaggttgcagtgagcccagatcgtgccactacactccagcctgggcgacagagtgagactccgtctcaaaaaaaaaaagttaagtttaaaaagaacatgcaaaagagcatctactgtatgttactctttcatgtaagaaaagaagattataagaatatacacattcacggctgggcacagtggctcatgcctgtaattccagcactctgagaggctgaggtgggtgaatcacgaggtcaggagtttgagaccagcctgaccaacatggtgaaaccccgcctctactaaaaatacaaaaattagccgggtgtggtggcgcacatctgttaatccagctactcaggaggctgaggcaggagaatcgcttgaacccaggatgcagaggttgcaatgagccaagatggtgccactgcactctgggcgacagagagagactacgtctcaaaaaaaaaaagaatatacacattcacattctgagaacggagatataataaaagaaaaaaaaagaatatacacacgtatcaactcatttgtacataaacaaattcacaagaaaaaagcagaaattattaagactaagatacctatagagaagggtggggaaagactggaaaaaagggggtaggagatgggactaggatagaagggatggggaagaagaacactttcctgagtataaatttttgtattattttttactgttaggaacatgtcaattgtttcacataacaccaaagtaaattcgtttctcacaatggtggtataggctaatgattttaaaactcccttaatgtgtacactaagatgggcaaataagaaaatctatcatgataatgagagccaggtttctcactatcacagaatagaagtaaatatcccaagtaagaaaagggagaagactacaatgataattttgtggtagtagactggaattggcgataacatgaatttgtttttacgtatagcaaagacacagaactaggggtatgtgtgtctacatacatcatatatttcctaactctgtccactgagaggtactaaactaaatacaataaaagaaaatacagccgggagcagtggctcacgcctgtaatctcacgcactttgggaggccaaagcaggcggatcacctgaggttgggagttcgagaccagcctgaccaacatgcagaaaccccgtctctactaaaaaaacaaaattagccaggcatagtggcgcatgcctgtaatcccagctactcgggaggctgaagcaggagaatcacttgaacccgggaggtggaggttgcagtgagccgagatcgcgccattgcactccagcctgggcaacaaggacaaaactccggctcaaaaaaaaaaagaaaaagaaaaaagaaaatccagtagcaaagagcatacctagtttccacatcttcatttctaaataccattctctaataaaaggagccagaactccttggagaaatagttgattcaaggagtggaacagaaaaaggacacaatgagtctggactgcctggagtcgccagaaagtaaataagtacttaaaaaacaatgagggcggctggacgcggtggctcacgcctgtaatcccagcactttgggaggccgaggcgggcggatcaccaggtcaggagatcgagaccatccgggctaacaggtgtgaaaccccgtctctactgaaaaatgcaaagaattagccaggcgtggtggcgggtgcctgtagtcccagtcactcgggaggctgaggcaggagaatggcgtgaacccaggaggcggagcttgcagtgagccaagatggcgccactgcactccagcctgggcgacagagcaaaactccgtctcaaaataaataaataaataaataaacaaacaaacaatgagggcatgtacaaatgactcaggaaccaacttgaaagagctcccagtggtcaaatctgcaacaatttgagcaagaaaatcatgacagttttggattacaacctacaggataaaataaatgcccatgaatccatactaattgtatcagaaaaacacatttccttctctcacagggtcaacataacagaacatttctgacaccagatcgctgggcggggtgacgggggggttccccacaccaagcaattctacaacaccagctgggtgtcctacaagccagttcaattctgacactatctatgtgaagacagcatcagatcccagtaacgggctcggtcctaaaagactgcctccaacactgcaggcacccgtgcttctgactggccagctataaactggatgttcccacaatcccctcctcaggttcaatcatttgctaaagtagctcacagaactccgggaaacactttatttatatttatcagtttattataaaggatattacaaaggatacagatgaacaaccacatggaaaagatacatagggagagatccagaagggtcacgagcacaggtgattccatcctaatgaaacatgaaaatggatgtgttcaccaacccagaagctctccaaacccccataattcagggattttttttttgaggctttttatataggtatgactgattattagctctatctccagtccctctcccctgcccaaggatgtgaagtggagctgaaagttccaagcttctaatcatggcttggtctttctggtgaccagcccccatccagaagcctatcaagagttgcctcattagaacaaaagatgttcctatcacccaggaaattccaagggattaggagttccatgtcaggcactggaatcaaagaccaaatattagaacaaaagatgcacctagcaaccctactgctcaggaaattacaagggttttagaagctctgtgccaagaaccaggggactgagaccaaatatattttcacaatatcacactaatataaataactgaataaataaatgagagagacaggacagctctacgttaaggtagaaagctaataatgcacacagaaggaataatggaactagaaaaatcgctatttggcaaacagcaaacatcacagtaataattaacacaggcaaaaaccatcaaggaatgctaaaatttgtggataaaagtatgatgagaaacaggataattgcacagcctcaaatatatattgcaagggaaaaaacagtaactacagtgaaaaaaaaactagcagacaaaaccatagccaagtgatcaactgtaacatcacctagtatccacataatgtgcctgctgacaggatgccctgagaagggcataataccacttctgtggtattcttgccaaaaatgtataactttaatcaaatcatgagaaacagcaaatagagccaaactgaggaacgttctacaaatgactggccaataatcttcaaaaatgtccaggttatgaacaacaaagaaagactaccaaaacatctcagattagaaaaggccgaggagataactaaatgcaaaatggtatcctggaccagagaaaggactaatggggaaaacggagaaattcaaatatggtctacagattagttaacagtattctatcaacattaattcctggttagataactgttctatggttatacaaaatgtcaatatttagggaagctgggtgaaagttacactagagctatgtacaatttttgcaactttttttccaagtctaaaattactgatatactgttttctctacttttatgtagctgaaatttcttcataagggggcacaaggaacttctaaaaaaattaaaatatagtcactgatattaaaacctcaattaacatgttaaactgcaaagttaggcacagctgaagaaagaattttgtatctagatggcaggtacaaaagaaaaaaaaaaacagaaagtggctcagagaaataatgagagagaagataaaagagcaaaattaagaggaaaggaacagggaattagaaaggaacacatatcaaacaagagttccaaaggagactaaggagaacgaaggaaaattaagaaaaaaaaggataagaattctctagaattaacaaacgacaaaaatgcttagattctagaaatatgaatcctaaccaggataaataaaaatatatccacatctagacacagggtagacaaagctgcaaaataccaaaaatcaagagaagcttttaaaaaccacaaaaatattaaaaaagataaatgataaattacaatgcaatacagacttaatcgtaccaacaattaaagccatacaccctcaaaggtctgagtgaaaataactaatcacgtagaattctatactcaactaattatcatttcaagaatgagggcaaaataaatacatttttagacaaagaccaagagttactattaacagacgcttattgaaagaaacactgaagggcatacttcaaacaaaaggaagctgaatccaaatggattaactgggatgcaaaaagcaatggtaaaataagaaattgctacactgagtaaacctaaaaacatgaaacttattttaaaaggtcctttaaacaaagctaccatgttcaattttttaaagtaattcaactcgtaaaaaaaacacaaaaaacaaaaaacaatggcttcagtaagatacctttcacaaagaaaaaaagcaccaaacacggaattcaaaaatttcaactaagaatatagctccctctcatttatcttggtcaaaggccttggtttcttcacccaaagaagggaaggaaggcatttagctagaggatccttaagattcccttccagttctaggattcaagggatagaaaacagaccttcccaatttaacagaacatccttcaaaactgtaagttgtttacaccaagatccttcatacacagggacagtgctttaaagcaagatccagtctaaagctttagattttaaataattggctatctgcttctatgcaaaagccaactggaaacggatatgatctcagaaaaagaacaaagaaaataatgcacttttaaactgttccatttttaaagagctgatggaggaaggaaaggcacggtccaagtggtaggacaatggaaacagtacaaaactcaataagcttaagtgaaaatttctaaaagaaatatagtatcaatatcaattgttacaaaaataaaaacagtcatattttattcctagttcacaaattagctgacaaacccctccttccaaaatcttaaagattcattgtaatttctgaagagtcatcaactctggaatacatcgaaggtagacaaaatccccaagtgcaggcagcctatactcataaaggtaccctattctttttcttttttttttttcatctccagccatacagaggaaggtatccttttctttataatcaccaagtttcaatcttctactaaggatgaatgaaaagctcaatgttacaagcaaagaaagcttttattaaaaagcaaagctattaaaatactgtgttatgtaaaggcattcagttatactacaactactccccttcaaaattccttcaataaatgctaggagatatggagcataaaaaagtagacaatacaattgaaacttattaatttgagacacggtgatggatattacttgatatgaagaaactaaaactggatgagagttaagatattaaaaaaaaaaaaaccctacattaacatttgagaacacatgtacacacacacacacaaagagacacacaccacgagtttgttgtttcttaatttccaagaccctgattcatatgccattcaagctaaacccataatccagatttcccgaaaagatcagtggttcttctaacacatcactcttattttttagataatgatctcaaaaaacctcatctccaaacatatgtgaatctatataatctgcctaaatgtaactggctacattttccactttccatacaaaaagaatctttttatggccgggcacagtggctcacgcctgtaatgccagcactttgggaggccgaggcgggcagatcatgaggtcaggagatcgagaccatcctggctaacatggcaaaacccgtctctactaaaaatacaaaaaattagctaggcaaagtggcaggtgcccgtagtcccagctactcgggaggctgaggcaggaaaatggtgtgaacccaggaggcggagcttgcagtgagccaagatcgcgccactgcactccagcctgggcaacagagtgagactccatctcaaaaataaataaataaataataaataaaaatacatacttttaaaatataaatatcattcaaagctgtttaatataaattcacttcaaattgaatcattaaagtttaactttataaaaaaaatctaaaatgatttggaatatgaaaggatcctaaacaaacaaacaaaacacccttaaacttgacacaggtcctcaacatcaccaagattagtacggttgcttagcatggtaactgtggaatcagactgaggggctccagcattaggagcagccacataggaatcacctctactcactgtaacataagacaactgtttactgtaactctggttgttcatttctctaacaatttcatacacacatcttcccgttgcttagtctgaactgtatactgctagtcattatcataaggaaaaaaaaatctcagactaatataatagaggccaaatttagagagaggaataaaaatcttccttcagtctaggctaaatggactgattacacaaagaactccatacatccgaaagcacacagatgtctgcactagttcccagggctcaaacaataccagtcattcaatagctttccctttacgtaagttgctatgagagagctcaatcagctcttgtgaacctcataatccaggatcctggaactctgaaaagtctacatttttcctcagcactgttttcatgtactttgtctggaactcaaacttcgtatttcccccaaaaaataaatctggaaatcatctcttctgtttgacaaatgatgtactctacctataattacttttcaactaaaaccacaatccacgatacaaatctaagatcattaacactgaaagatcatctgatgaatatatttttcagtgtaggagtttaaaatataattttaaatacgctccatcatttgtacatatatcaaatgtatatataccatttgaccagattctatttgtttccagttgagtcgtttttaaaataaccatgacacaaaatgacttctcaaaattaaaagaaattttgagaggactgttaaagctggggaggggggttgaatttacccgctctctctcccctactctcccctcctctgcctcccacattaaccacacacatcaaaaataatacaaaatatttcactgggtgtttgaccaagcctttagtccacagaaagagttattcttcactgaaccaccttcagaagctaaataacactaccttctaccttcaaagtaaattgctactgattcttccaataatcttttttatcagctaagtctttggtgaattctcacattcaataatgagaaataacaaggataaattaaagccacagaaactctaaagtattttttaatcaaatggcgaaattacttcagaagatacttatcagacctgctacccagaagtaaagctcattagttttggggaacaaaatgaaaatgattaatttactcactgaactgttagatcctgaagagtcaagaggaactatatacattcagttccctttaataatgtactatcaggtaatcattaatctcttatagaaatgatcaagatcccattccaaaatttggtaatgaagctcataacagctcttgtgccccttctaattattttaacactcttcctctcttcacattcatgttacataatgcaaataaacatgctttgaagaagaaaaagttgtctctcccaagttttctgtccttaaacagtaaagataaaccaaaccccctctctccaaccagagtacaaaatgcagaactctgaacataataaccatttaacagatatttcattaaatttcaatcatcacccttacagtggtaaaattgaacttgtcaagaagaggggaaaaaagaactttatcttttcaccacggtattcttccctaatgacgactacaagcaccaaaatcctatgtgttctacaaagcagtaacctcagaaacatttcaacaccctctgagccttacaaactctgttagcaaaacacaaactccgtttctcaaaaatatctataaagttctcaacaaccaaattctttgataactacagttacatctgagacctcctcctcaggacatccaatcgtttttcctacgatcagagccactacaatatttcctggtgctttaagagcaccatcttgcttcaacaaacacgttttaatttcactctaaaaaatacatatttgtatttccagacatctccctctaaaatttccctatactactgcccacataatcctttacagtcaaatcagtcttctcatttttctacaacatggcatcctgttcaacctctgtaaccaggcctgatatcaagataaagaagcacatataaacctttcttccattctccccaagttctcatttattacataaaaagaattcactcctttctataagtgaaatgagttttaaagcattctaatacaactgaaagctaaagaaaacaaagtattaaaatagtacaggttatttatctttggattttaaccaaatattagtcattttaggttcatgttcagatagttatctatacttagccatgacagactagccatgacaatttattcaataaagaaatatcacaaaatggtgtatactaatagtagaaatgagacatagtaacagagaagcaatgtgaggatacagttcacactctgaaatgagatttactcagagctttaagttttccttctcattagaaaataaacctttattgcaaatatatgtttagctaactagaaatgagttatttaataatttttatttttcattcaatactgacattaaataacgcttcagagtgtaacaaaaaaacactagtatcacagtatcattgtgtatataataaaaggtataagatctagattagtctatctcatcttgggctatcaaatacttctcatttcattccttcttctctctctttaaattatcttctgatatcacaaaaaataaatacagaagaaaacccaagaaatataaacatggctattagaaacccaaaacgatttacagaaacactaagaacacaacacactgggcacagtggctcacacctgtaatcccagcacttggggaggccaaggcagagcgattgatcacttaagcccaggggttcaagaccagcctgggcaacacggtgaaattctgtctctacaaaaaaaaatttttttgagacaaagtctcactctgttgctcaggctggagtgcagtggtgcgatctcagctcactgcaacctctgcctcctgggttcaagtgattttcgtgcctcagccacccgtctagctaggattacagatgtgcgccactacgcccagctaacaaaaaattttttttagctagccaggtgtggtagcgcacacctaaagtcccagctacttgggaggctgaaatgggaggatcacttcagcctgggaggctgacagtgcagtgagctttgattgcaccactgcactacagcctgagtgacaaagcaaaaaccctgtcaaaaataataataacacaacgtaactttccacattcaagtctactcaacaaagaagcccaaagaatctaaaattcctgttttcgatctttcttttctcataggggtcagggtggtgtatgtcagtggagaaaaaccgaaaggaggtatgatgatcttcgtacactgtacaaaaacttacccacttgaaggatctaaggcaatagctctgggttgatccaactcttgccaaaataaaacttttcgtaaagatccatctaaattagaaacttcaatccgattagtttcagaatctgtccagtacaatttttctccaagccaatcacatgccagcccatcgggggacaataatccagaaacaacaacattctgcacactctcagttttgttaaattctgttcgtttaatggcttcttcgctgacatcactccagtatatcaagccatgactaaacacaaagtccaccgcagctgcatcctccaagcctccaactacaatcgtagcattctctttgccatttgtagcatcaaccaatcgcaagtcccgtctgtttgcataaagcaacaaaggggccgctagaacaaaaaaagaaaaatatgtaagtgaaaaggaagaaaacgtattggttcttataaactgcgtttcaaatcggtttaagtgagcaaagactgtcgaaaataagaaaagaataaataaatcattaggagaccatctaaacttcacacacaaaatattatttttgcagcatttaaaaaataagacataggaaatggggggaactatttccaccacgatagtcttttcttgttaaaataactcagataaaattttaaagcctggctataccaagaattggcaataatatggagctactggaacactcatactctactggggtgaatgtaaaatggtacagccacttgggaaaacagtttggcagtttcctaaaaggttaaacatacaacctactatacaatccaaggcaatagctagatactgtttattccacatctaggtatttactcaagagaaacaaaaacatatgtcaatacaaagacttgtatgcaaatgctcataccaatttatttgtaataacccaaactggaatcaacccaaatgtcatcaacaggctaatggataaaaaactgtgatactgccatacaacagaaaataatgaaccctttgtacatgaaaaatgggtggatctcaaaataattcagaatgaaagaagccaggccaaaacaaaggtatatattgcatgactctcatctatataaacttttacaaaaggcaaacttttgtaaaaacacaaagcagatcaatggctgtctcaaaatagggaaagaaggtgcaaaagaatgagggggaggattaaaaatgggcatgagcaaacttttgcaggtgatgagctatattatcaataatgatggtttcggaggtgtaaacatgtcaaaacttattaaattttacacttaacataagcaaaatttattgtctatcaattataccttaataaaactgttacagtttgacagaaatagttcttagtaaagctactttattctgttctatattactattaaaatgacctttgaaaagacccgaaactaaatataaagccaatcttacagaaataacatttaactttgagaaagttgaagctgttgggagtgaggtagtataaattccatgttttttggtttttattaaatatctattccaagcttctgacatttactttcctagtatcaagcaacaattaaaaatctagagcactactgtcctacagaactttctgtgatgatggaaatgtcctctccactgcataacacagtaccaccagtcacacgcagctatggagcgcttaaaatgtggctagtgtgactacaaaattaaatttttaattttatataaactttttttttttttttttttttttgagacagagttttgctcttgttgcccaggctggagtgcaatggcacgatctcagctcactgcagcctccgcctcccaggttcaagcaattctcctgcctcagcctcctgagtagttgggattacaggtgcccaccactatgggtccggctaattttttgtatttttactagaggtggggtttcgccatgttgaccaggctggtcttgaactcctggcctccggtgatccacccgccagggcctcccaaagtgcttgggattacaggcgtgagccactgcgcccggccccaattttatataatcttaattcattccaatttatatagacaagtgtggctagtggtagtattggatagcacacatctagaggctggaatgcagaacataaatgaggcagcaaaagtaagaccaagccaggcacggtggctcacgcctgtaatcccagcactttggttaagcccgggagttcaagaccagccttggcaacacatggaaaccccatctctacaaaaaaattaatttaaaaaagtagccaggcatagtggtgcacgcctgtagtcctaggtactcaggagactaaaatgggagggtcacttgagcccaggaatttaaggctgcagtgagcctgggtgacagagggagaccctgtctcaaaaaaaaaaaaaagagtgagttatgatacaattatctacatgatcttctttcataattacttactaagggtctacaactgtgtcatctgaagccaagcccaactaccatttagaagtaacgattccccttttcaagaaattactccaatctcaaaaaagtgtaagaaaaaagtgatgtttacactatagattgtgtctgtcaaatagttataaatgtatactattttcatctataagtacaacataaacttccctaactaagcttaaatccaactttcttagtcaaaaacaaactggcagacagcttttttaaaaagtggctaaccaatctttctgcttattctgtgtatctgctgcagctatcagcaaattcataaacttccctaacagagtcacttttaattcatttctggccttcacacatcacactgatttatcagtccccacagagcccactatactgagtctctcatactatgggccaaatataaacatcagaaaaaaggtccctactagtgaaggatacaatgctaagtgctgcataaggctaaggaatacccacgaaacacttaaaattgaaaattcaagagtgataatcatctaatatttactgggcaccttctttatggcactatcttggaaaactatatcaaagctataggacattaggtggcagccaaatgtctttcattgctttcaagtcaaactttaacacttctacgtgtactgaatatttttggtctacaaaatccaaaaacgctttctggtcagttaaggcctcacaagcattctgagtctcttctccctcctgaaaacgggtgaaggaggcaaagttaatcttttttaagttagcaatactggttacaattgaggatttgtaaaggactgtacataaatctgctgcacataaaccacactattgaaaggaaatcccagggttcatcctgtccaaccacccttctgatgcttgaatactttctattacattgtcaccagtatctgttcagcaacatattaaatgggatatctgataggtataatttgatttgtaacattgtttttatctaccaaacagatacactggaaccacatacttgctccctggaacatgccagtatcttccattccagagagcttactttctgactgcctagtattcagataacccaaataatcaccatcacttctcttcagtggaacactcacagtgctcaggaatccttgttttcctttattaaactcctgggaaactttctctaccagcctttctaagccttttctacttttaaagactaatttccatgccctgaatcctttatcctcagatcatctcataaaacaatctcagtgaagcaggatacaaggtaaatgtcatacatccccaacatcttaatttatacctctcaaaattttctctccacccatcttcccttaccttgtcctcagtctcaaatgagaagatggccttcctcctaaggctaaagcaatactttcggttcagcctccttacctcctctctacaacttcgctctatcaattgttctgtatttctcgtattttcaatggtttacgccaggttccttgctattgttttgttttaataaccctaaccttgctaccatcagaataataattatatttctactaactgcaaaatcttataacattggtatatatacttcacactaccattcattagctattactcttttatctaacttcctatccatcactcaactgcaagtgcttcctctaaatctttataaccaaatccagtggtcttttctcagtctttactcttttttttttttttttttttttttttttgagatggagtctggctctgtcgcccaggctggagtgcagtggtgcaatctcggctcactgcaaggtccgcctcccgggttcacgccattctcctgcctcagcctcccgagtagctgggactacaggcgcccgccactacgcccagctaatttttgtatttttagtagagatggggtttcaccgtgttagccaggatggtctcgatctcctgacctcgtgatccgcccgcctcggcctcccaaagtgctgggattacaggcttgagccactgcgcccagcctctcagtctttattcttaacacctctagagcagtcaatgctgttgactatatccctacctatatagaatgttctcctcatacaatactacctattttttcttgtcttgtttcaaaccttccacttcctatatataggtatcctaagactctctgttgttccaaatgacagagtataaaaaattaaagttcacaagcaacagcaacacaaggtggcagccaccacaggctcgggggtaaaagtcccttgcaatttcccacttttggaagaactcaaagaaggccagaaaggagtaggagatggcagttagctgaggtctagacaatgataaagacgtgacacttacaagacgtacagggatgataattgggcctgcaagaacaatttatgaaaactgaatatacagccttaaaataaaatgtggacctaaatacccagaagcacccccctttgtaagatttgtaacaaaaaattaatatgaatggagttaatagttctaatggattggtggacccaagagccatatcagtgctagcaaaatggcagaattcacagcaccaaagttgtcctgcaagagctttggcgcctaatggtgtctaaagaaaatatgaaactccctcagccacctcaaggacagtgttacagcaactaatcgaaaagaaaaaccacaacacagtgttacagcaattaatcgaaaagaaaaaccacaggcccttcctcttccccctcattcaatttaagcagtcttcattttccacagcagcaaattttctagatatgtcttgtagacctcaaagtactggaaaggaagctcccattcaaaggaaatttatcttaagatgctgtaaaactaattttttgtccatttgaaatatataagttgtgctataacagaaggaaggaaggaaggaaggaaggaaggaaggaaggaaggaaggaaggaaggaaggaaggaaataaattaattaaagttcacctggtcaacaagcaattctatgcagctaattcccaaaacatcatctctagttctgtccctctaactttttgttggccatctctacctcccgttaaattaaattcatcacctttcccccaaaacaacaaaatccctcaccagtcaatggtacacaattctaaccttactggcatgccttggagccatctttgagcccctccccttttcccctagtctgacaattactgtcttgttgactcttattttacaagcatgtctttaaatctgtctcctcttctccatttttaaaaccactatcctactctagaccttcatgactttaggcctaaaatatcctaatagtaagttatctcaatattctcccctttccttttctacttctaatactttcagtttagccaactcaaaagccattctgattccccttgcctaaatttacaaaatgcctcaatacctcagccttccaccatgacttctacctaggactctaaattaatcttttatagtctctgcatcatacaaacaggtttcaaaacatgtaaactgggagtacatcacacccatcattgcagagtattcattttcctgcctactccatacttctctttttctcccagcaagcaagtccttcaaggccagagtcaaaccttacctactctgtaaccctttctaattgactcagctttacttcttttaatccttagtctttagtacttacatgatattagctttttttttttttaagcatacttcctacctctaggatctcagcccttggaaacaagaaccataccttataactaattttatcatcaatgcctactacagttcactgcacacagaaatatcatatacatatttactaatattttgggggttttgttttgagacaaagtctcactgtgtcacccaggctggagtgcagtggcacaatctcggctcactgcaacctccgactccctggttcaagagattctcctgcctcagcttcccaagtagctgggactacaggcgcccaacaccacacccggctaatttttgtatttttagtagaggcaggtttcaccatgttggccaggctggtctcgaactcctaacttcaaatgatccacccacctcagcctcccaatgtgctggggtaacagacgtgagccaacgcacctggcttgatttttttcttcttcttcgtttttcgagatggggtttcgctctgtcacccaggctggagtgcagtggtacaatctgggcttaatgtaaccttcacctcccaggttcaagtgattctcctgcctcagcctccctcgtaggtgggattacaggcgctcgccaccacacccagctaatttttttgtatttttagtagagacgtggttttgccatgttagccaggctggtcttaaactgctgacctcaagtgattcgcccacctcggcctccgaagtgctgggattacaggcgtgagccaccgtgcccagccaaagccggctaagatttgacgggtttatttgtaagatgtttttaagtgcttatcaaatattatagttacgtaaaactagattttagttttctctgttaaaatgacggattttcttcagttattagtttgtctttttgatttttgttttttgagatggagtctcactctgtcacccaggctggagagcagtggtgggatctcagctcactgcaagcaccacctcccgggttcatgccattctcctgcctcagcctcccgagtagctgggactacaggtgcccgccaccacgcacggctaattttttttgcattttttttagtagagacagggtttcaccatgttagccaggatggtctcgatctcctgaccttgtgatccacccacctcgacctcccaaagtgttggaattacaggcatgagccacggtgccccgcccattagtctgcttttaataaagaagttattaaaggttttcctttgccttctgaataatctccacagaaggcaaagattgtgtcttaccagaatttcctgtgcttaatgctgactttatcatgtccttaattacttaaaactgtattcacacccttaaaagggtaaggttcttcaccactgcattacctcccatgcttacttttttcaatattttttttaagagacagggtctcaccctgttgtccaggctggagtatagtggcacaatcatggctcattgcaacggcacaatcatagctcactgcagcttcaaactcctgggctcaaacgatcctcctgcctcagcctcctgaggagctagaactataggcatgaaatctttcgcccagctaatttctgtagagacaggatcccaccacgttgcccaggctggtctcaaactcctgacctcaagtgatcctcccatcttggcctcccaaagcactgagattacaggcatgggccaccgcactgaactaaaatctttttttttttccggtcacttttggttaaatatgtagccaagtatttttttccacagtggcccatgatcctatttaatcaaatgttcaaacctcctaaatgatgccttttgtaccaacaactgtctttgagatttcccctaaggggccctagaaaatcaaaattccctttaccttgtaaaagagagatgttaaaaataatagtttatttgatcaaacgttatgggtcatatggaaagcactgtcaaagccagagaggcttaccctccctaagtttaagttaaatttgtataggtaaaatgttattaatagggatattttggaagttctatgaaggtataaagctcctagaaattcatcaatgccctcattgtccatgtctattaatcagagttctggtgctgctttgcctggtattagacaacagtataatgtcatcagtcataatttcagggattttttttcctcaatgttaacttggtcataatttggcttctttaatcttctaggttggctaatggttctcagttaagaattcacatcatttacttatggaatgctattatatagaagttaacgacctactccagactgctaaatctttttccttgataatcttgatacattcttgatatactctatacatatatacattcttgatatactcttgacatattcatggtccattacatcttaggattatatgtctttagattttctctctgcaatgaatatattcatctatattcataaatgacatgtactagccactcttctttaaaataaggttaatcggctgggcgcagttgctcacaccttaatcccagcactttggggggctgatgcaggttgatcacctgaggtgaggagtttgagaccagcctggccaacatggcgaaaccctgtctctaccaaaaatataaaaattagcagggcgtggtggcgcgtgcctgtaatcccagctacccaggaggctgaggcaggagaatcactggaacccagaaggcagaggttgtggtgggccaagatcgcgccactgaactccagcctgggcaacacagcgagactctgtctcaaaaaataataataaaataaagttaatcattacgcttatagatatgcttttgtctaacacttttttgggttgattttagttcgcatgccacaaaaatcaaacttccttgccaatttcattatcttttctaacaaagtttcataagatctttcactttttttctttttttttattattatactttaagttctagggtacatgtgcacaacgtgcaggtttgttacatatgtatacatgtgccatgttggtgtgctgcacccattaactggtcatttacattaggtgtatctcctaatgctacccctcccccctccccccaccccacaacaggacctggtgtgtgatgttccccttcctgtgtccaagtgttctcactgtttaatttccacctatgagtgagacatgcggtgtttggtttttcgtccttgcaataggagatctttcacttttaagattatcagtaataggttaatcatcaccgttttaagtattttgtcatctacagatagttttctgttttactctaatgcttccctgaaagcacttgcaaatcagctacaggccagagtgcacttgtcttcaataaaaaagggctatgggccaggtgtggtggctcacgcctctaatccccacactttgggaagctgaggtgggcatatcactggagcccaagagttcgagaccagcctgggcaacttggcgaaaccccttctctaccaaaaaatacaaaattagctgggtatggtcgcacacacctgtggtcgcagctactagggaggctgagatgggaggatcacttgagcccaggaggtcaaggctgcagtgagccaagattgtgccattgcactccagcctgggtgacagagtgagactctgtctcaaaaaaaaaaaaaaaaaaaaaagaaagaaagaaaaaggaaaactactacgccaggtaacctgaacacaagcgtctgatggcatcacttaaataactctgagaccacaccagtggactgagtcaagatttccaaacagctagtagaaaaacagatgggttcgtgagactgctaacacagatccagcagaacaagaattaattacataggactgaataaactgatgaaggatgattatgggtttcgtttaaaatattgctgatgccttagcgtcctattttctggatataaggaacccctttctcttttctctgaagctatctataactcacaacaatttaaggagactatgtttttgtaaaccgaaataaacacttatctttttctcccccgtcttactcctccagaattcaaaaactcttattatttttattttcatggcaatatagttatctgcagaggttcaatgagtctgccttctagctggaaacattacttatgcaaccaaggctttgactggaatgccacatttgaaaatattcatttaatcaggtatgaccaaatacttctaagttacagttgactttatgaaccaacgcttacagtcctcttaggaaaactggcctggtaactggcttacagagttcccagccttgcaggtgaattaagcaagatcacttcccggcaggctcaaaaatcctagaatattttgggaacttcaagacaggaattcacccaaatttataggtattacaagtgaaacctgatggtcagttcttgacttacctttatagtctcaagaggcattttaaagtccaatcagattccttaaaaaaactttcagcaaggcaatattaaaagacctattatatgataaattactattattgctacacctatgtaaataatcaggcccaatctaatgagatcaacttctcaatgactcttattccattgtcaacagtgactgattttgttttaaacaacagggagactgaccagtgcacatcacaattgcccattacttactcattgacttggcttgaataaactttagtcaggattctcttctccccacaaattcctaaactttggcttgccctaagcttaagaaagtagatgcacaacttcttccctcattctgaccattagctgactgcagaaaaaaaaaaaaatgctttccagttaaatagtcctggtcatgcaatctgctcacccctacctatttggcccacattcccacaaagttcctgatagccctgcttacttctcctttctataaaaaaaaaaaaagcctttttcggtttgattttgaagtgtgttgcagatcctgtagtaagcatgtccttctactgcaaaaatcctttcaaataaagtctctccttacctaagtctagctttgtttttgcttttgggtttggtcacttttttttttttttttttttttgagacagagtctcactctgccatccaggctggagtgcagtggtgcgatctcatctcactgcaacctccacctcccaggttcaagcgattctccctcctcagcctctcaagcagctgggattataggcaccaccatgcctggctaatttttttggattttttttgtagagatgaggtttcactgtgttgtccaggctggtctcaaactcctaagctcaagcgatcctctgccacggccttccaaagtgctgggattacaggtgtgagccactgcaccttggcctcagctttgtttttatttacagtataagtactatgacaaactacctatttgcaaatgccaaattttacattaatatgtatttccctctatcaaagtcatcagcatctctttcaaaaccacaagaaggcccaggtaaaataaggtacatacagaaagtcctgcacgtaaaattactgtccagagtacaaacaatctggctttagtcattcatctttctgatttataaaacgaaggagttggcccaggtaatttctaatacctcttctattttcttactctagatatgaatttagtaaaaagatttaactgcaacaggacgattgacagggctattcagaaacacgagatactggtaaactatttagtgcttctccagcagaaaaacaggaacttaaaatattttttaggccaggcgcggtggctcatgcctgtaatcccagcactctgggaggcagaggcgggtgtatcaccgagcccaggagttcaaggccagcctgagcaacatggtgaaaccccatctctataaaaaatacaaaaacttagttggaaggatcaccggagcctgggaaggtccaggctgcagtgagcaatgatcgcgccactgcactccagcctgggtgacagagacaccagctcaaaacaaacaaacaaacataggccagagtggtggctcatgcctgtaatcccagcactttgggagccaaggcaggcagatcacttgaggtcaggaggtcaagaccagcctgaccaacatagccaaaccccctctctactaaaaatacaaaaattagccagcatggtggcacacgcctgtagtcccagctactcaggaggctgaggcatgagaatcacttgaacccaggaggcagaggttgcagtgagcagagattgtgccactgcactcctccttgggtgatgaagcaagactctgtttcaaaaaaaacagatttttttaacgtatcaaaagctgagattcagaaataatttctcaaggtaaagactccaataatcaaacccacactcatttgaaagtatttaatatatccatacaatggattactcagccattaaaaggaatgaagtactgacacatgcaacatgaatgaaccctgaaaatgctaagtgatagaagctagacacaaaaggccacatattttattccatttatatgaaatattcagagtaagcaaatccatagagacagaaagtaaattcatggttaccagaggctgagggaagggagaaatgggaaatgtatgggttttgagggagcaggggatgataagcgttctggaatgagatagtggtgatgttttacaaccctgtgagtatactaaaagccaccgaactagacattgtaaaatggagatttttactgtatgtgaattatagctccaaaaaacttggtttaaaaaagtacttgacaggccgggtgcggtggctcacgcctgtaatcccagcactttgggaggccgaggcgggtggatcacgaggtcaggagatcagaccatcctggctaacacggtaaaaccccgtctctactaaaaaaatacaaaaaaaattagctgggcgtggtggtgggcgcctgtagtcccagctacttgggaagctgaggcgggagaatggcatgaatctgggaggcggagcttgcagtgagccgagatcacgccactgcactccagcctgggcgacagagcaagactccctctcaaggaaaaaaaaaaaaaaaagtacttgatagaaagggcttaatgaaaaaaaaaaaagaaagaaagaaaaaagtacttgaggccaggcatggtggctcatgcctgtaatcgcaagcactttgggaaaccaaggcaggaggatcacttgagcccaggaattcgagaccagtctgagcaacatagtaagaccctgtctctacaaaaaaaaaaaaaaaaaaaaaaaaaaaaaaattaaaaatgagccgggcgtggtagcacgtgcctatagtcccagctactctggaagctgaggcaggaggatcgcctgagaccaggaggtccaggctgcagtgagccatgatagcatcacaccacactccagcctaggaaacacagtgagaccctgtctcaaaaaaaaaaaaaaaactaattatatcagtgcaatagttatatcctaaaaccagaaaacacgttacatagtccacaccttgaattcaatctcagatatgaatatgctgattttttagtagtctatttaacatatctaatctatgctaagaaatctttatttatttattttgaaagacagggttttgtctgtgatatggagtgcagtggcatgatcatggctcactgtagccttgagttcctgggctcaagtgatcctcctgcctcagccttctaagcagctgaaactacaggcatgtgccatcgtgaccagataattttttaattttttatagatgtttcccaggctggtcttgaactcctgacctcaagtgatcctctcgccttggcctcctaaagagatgggattacaggtgtgagccaccatgacccagactaagaaatctttgtaatcgttacaaatttataatttaactatagctaatgaacgattgagtcaaaacacaaaatggcattccaaataaatgtcataaaaattcacatctttttatattactttaaatgtaaaatttacagtgctcaatatgtgcaaacctctggtacatggtgcatataaaggggaaaaaggtctactcttcaaaaacttttcatcaaagagctatttctgcattagcataaatctagaaggttacaaataaagacaatataatgtgtagctaagaattcatggtaatgaagttcactcgtcacctttctcagacttgcaaaacatagtatctttaaactggatatatggatatacagtacttaaattatacgtaccaataaagctaatcattagtgaggaagactcctatcccttgcagtcctttacttgtagtttgggtcttgtagtgataaaacaatgactaagaccattagagaaaatagcctcctggttaaacatacataatttgataaaggtaggtttccaatatttgggtgactattttcttgggaaaaaaaaaatgacagctgtgtgcagcaggctcacgcctgtaagcccagcactttggaaggccaaagcgggtggaccacctgaggtcaggagttcgagaccagcctggccaacatggtgaaaccccatctctactaaaaacacaaaaattaggtaggcatgatagtgggcgcctactaatcccagctacttgggaggctgagacaggagaatcacttgaacccaggaggcagatgtcacagtgagccaagatcatggcacggcactccagcctgggtgacagagcgagactccatctcaaaaaaaaaaaaaaaaaaagactactgctggtcatgttatttttattgagagtctcatcaataactttaggcctggtgttaataacttacataacttaatgtagttttctgcctaaaaatataatttcattttgcatccccaatctcctcctgaaattagttccaaaatatttaagcacttatacaaggtccttccaagcaagatattacagaaactacaagttatgataccgctaaaaggatcacagcatcaaagtatcaataattttcaccgaagagtccaagcacattttaaaagtttctagcctcacacccgaacagcttgaacctttagtgagaatactcactgccgcaaacacgaacagcttgagaaacaaaagcatatgttaataataccaaataaccttgtttccttgcatttatgtactgacaaattgtattttaaaataaataattttaagagcaaacagcctgttcttagattgcctagtctgtatatttgactaaatttcaaagttactcatataaaacagtgttttattcactgaagtgaggcttactttatagaagataaacacccttatccgaagtgaaaacatgcaatgcagaaactcagtatagcattcagccatcctgcagaaagaaatccaccaactgaataattgttgtaaacaaataatgcaatttctcaattagatgtcttgataaaattattttgcccatgcttaactctttaataagtatcacaatcatttgaactgtctgttctgtagcttatttataataatcatcacctaaaatagttatggctgcaatcctttagaaataaatttaggccaggcgcggtggttcacgcctgtaatcccagcactttgggaggccgaggcggctggatcaccaggtcaggagatggagaccaacctggctaacatggtgaaaccccgtctccactaaaatacaaaaaaaattagccgggcgtgttggcggggcctgcagtcccagctactcgggaggctgaggcaggagaatggcgtgaacccggggggcggagcttgcagtgagccgagattacgccactgcactccagcctgggcgactgagcaagactccgtctcaaaaaaaaaaaaaagaaaaaaaatttagtgtcattccgttttatatcaaacaaaacagaaatttccataagtaaaagtattttatggagcttttattccagttgcagaagaatcaaaaaaaattccaaaaccactggcctaaaactatcaactgccaaaaacagtgcccaggacatagcgacacttaaaatgttttaccagtctttccagagtataatgtttcttttaattcggccatcttaataatagcaaccatttattcaatgtctactattgactgtgcgttctactacccctttacaaacatttcgtcagttctcacagaagtcttgcaagttatatccccacctaacaggaaaggaaataacttgtccaaaggaacacaaagcggcagaagagtttaacttggcctgtttaacaacaagccatgtctttctgctatagtaccttccatataatcttctctaaatgtaaactttcaatagaatttctacgatgaaaataatctttctcagagtagttacccatggcctaaatagcactaaacattatttttccagtatgcgcaaaatatttaaacaaaaaatatacgttctcataaaatattttccattaatatatcccttcccagaatctcctttgatatttaaaacagtcctttctgacagccaaagcatatataaggacacagtagttcagtacagcaaatggaaaaacttccaattaaagcaaagaaaaaaatctcttaaaaattgaatcatggccgggcgcggtggctcacgcctgtaatcccaacagtttgggaggccgaggcgggcggatcacgagatcaggagatcgagaccatcctggctaacacggtgaaaccccatctctactaaaaatacaaaaaattaatcgggcgtggtggcgggcgcctataggctgaggcaggagaatggcgtgaacccgggaggcggagcttgtagtgagctgagatcacgccgctgcactccagcctgggcgacagagcaagactccgtctcaaaaaaaaaaaaaaaaattgaaccacaggaaatcactattagcccttctgataataacaagctaaaaccttaaaatttaataaccagacaaattattgtttagccaaatgagcaaacctgaagccaggtaagtaaacaggaatgacagtatcaaattaactatatgaaactgtcatcaaatatcaatgtaatacttgacaagtttggaaaataataggttaaacaaagttaaaaccggtctctttacctcaggacttttcagaacccttaatgtgttaacatgaattctaatctccaaataaagtgtacagagatcactcaaggttacacagcaaatttagaaccataacttaattctcctgattgccactccaaaatttgttctacttccccaagactttataacacctgattttaaaggaagaaaggatcgcttctacagaaatacaagatgcaaaacattagtggtttgttccaacaatatttaccagcccaccaaaacaaaaaaaagtaacgaagaatttttatataacaagcctcctcaaaaaaagctaaaaaggccaggcgcggtggctcacgcctgtaatcccaacactttgggaggcagaggtgggtggatcacctgaggtcaggagttcgagaccagcctgaccaatatggtgaaaccccatctctactaaaaatacaaaaattaggccgggcacagtggctcacacctgtaatcccagcactttgggaggtcaaggcaggtggataacttgaggtcaggagttcaagatcatcctgaccaatatggtgaaagcccgtctctactaaaaatataaaaattatccgggcatggtggtgtgagcctgtggtcccagctactcaggaggctgaaacaggagaattgcttgaacccaggagggagaggttgcagtgagctgagatcatgccactgcactccagcctgggcgacagggtgagataccgtctcaaaaaccaaaaaaatacaaaaatacaaaaataagtcaggcatggtggcaggcacctgtagtctcagctactcaggaggctgagacaggagaatcgcttgaaccaaggaggcagagattgcagtgagccaagatcgcggcactgcacttcagcctgagcgacagagcgagactccgtctcaaaaaaaaaaaaaaaagcaagctaagaaatagtatttcacagattacacacaccgatggtattccaaaacctatattcttatcaaaaatacttccagcagaagatcagatattattttttctcatcagtatccgaatggaactaagaaaatggtaaggatggcaacctaaactgtgaggcccgttagattaggaaacacattgttttactcaccatcagtaccagaggctgacatataggaggtattccatacatatttgctaaaagaatgaataataaatccctgccccatctttaattaacctacctttattaaattacagtatctctgaatctgagtttccccacttacaaataaactggtgaggctcaaacgaccaagatccctttcacttttaagaatgtgtgaatctgggccaggcgtggtggctcacacctgtaatcccagcactttgggaggccgagatgggcagatcacctgaggtcgggagttcgagaccagcctgaccaacaaggagaaaccccatctctactaaaaatacaaaaaaaaaaaaaaaattagctgggcatggtggtgcatgcctgtaattccagctactcaggaggttgaggtaggagtatcgcttgaacccgggaggcggaggttgcagtgagccgagatcatgccattgcactctagcctgagcaacaagagcgaaactctgtctttaaaaaaaaaaaaagaatgtgtgaatctggccgggcgtggtggctcacgcctgtaattccaggactttgggaggccgaggtgggcggatcacgaggtcaggagatggagaccatcctggctaacacagtgaaaccccgtctctactaaaaaatacaaaaaaatgagtcccagctactcaggaggctgaggcaggagaaaggcgtgaacccggcaggcagagcttgcagtgagcggagatcacaccaatgcactccagcctgggcaacagagcaagaatccgtctcaaaaaaaaaaaaaagaatgtgtgaatctgcacctgtaatcccagaactccgagaggcggaggtgggaggatcacttgagcccaggagtttaagaccatcctgggcaacatagcaaaactctggctctataaaaattagccaagtgttatggcacacaactgtggtcccagctacttgggaggctgaggtgggaagatcacatgaacacaggaggtccaggctgcagtgagcagcgatcatgccactgcactccagcctaggcaacagagcaagaccctacctccaaaaaaaaaataggaattcgtgaacctggccaagcatggtggctcacacctgtaacctgtaatcccagcactttgagaggatcacttgaggccaggagttggagaccagcctgggcaacatatcaagacacccccacaccaaccccatatctacaaaaaattgggggcatagtggcacgtgcctatagttcagagctttgggaggatgaagcaggaggatcacttaagcccaagactttgagactgcaatgagctgtgattacaccactgcaccccagactgagtgatgaagcaagactttgtctctttaaaaaaaaaaaaattgtgaacgttatacaaattaaatctcaaatcatgaaagcatttgaggatatgtccctgaacaagcaaaaattatagcaaaaagtaacattaacaaggtactccatattatttcatttaaaacacccaataaccctgcaaactagtcaggtatcattatccacactaccagtaaagaaactgagacctagagaagcggactagaccagaaccacaaagttatgaagttgtgacacttgggctttaaatccaagattttagtattgaaattcccaaatctttcctttataccttgtcatgtgatgatagagatagggacacagcactaacagtattccctggctttctgctactaattcaacagggctacaggacagaaggtctcccagactctcacataccccatcacacccagccaatgttaaagccccaattctttgtgggggaaaaaaatgacctaaatgcaacaaatcaatcagatttttctccttggagtccaaggttgactaaatatctttactataacagaggatgacattctcaaagaatgaattaattctaaattatgaacaaaaatattttacatcaaaagacagttttacttcaaataatatgtactcacagctaagtacagtactgttacatattagaagaccaccttacaccatatttcgccacatttaaaacgagagctccacttctgaaaactttgctagtggaaacgagacaatttaaactattacctcttccaggtcttgttacataaataagtgcaacctatctaaattccaataatgaacaaacccagctctggtctcaaagctggtgttaaacaaacggcatttacatcacacgcttctcctccaagaaatacaactagacaaccagaaacatcccaagttataagttttcccacgactctaaccaatcagctggttctcatatttgtcagccctattaaccttatgtcttaaaatacatacatattcttatgtcaaatatagttgtttctaacagctacagcaaaacccctttcaatagagtatgccaataataaaataagtatatacttatgaaacctctccagtacgtaacacttcattaaaatttctgccacaaaaatctaatgaacactacctttccggggtttacatgtgggaaaactttgtaatatgcttagagtatcaagtaatataacatgcaaacacaatgctgcattactacagagtaactgaagaaagtatttctcctcctccaaaaaaaaactcaatcattctcatccgaaatacatatacacagtacacgcaaaaatatacacctgtcacagactattagttactattagtgttctgtaaacttaaattagtttggagaacttaacaaaagtttagcttgttaacacctaaaaatctccagcgaccagcggtcacatgcctgaaaagaacttactatgaacgccagtaagaactttaccaaaccaaaactacaagccaccgtatcgagcagtacttaaattcctctgctggtaaatgctccacagccatcacagccatctcaagttcaacactaaatagtttgagaagagctgccgacgggccagtcaaaaatctttgtgaactgtcacaaaagtcacagagcatgtgtcagctttgcagtccaattcaaaacatcatagtgccatcgaattcaagcgattcccagagcaaattatctcgaacagcctatgcaatttaccaaagtgccaagcagtccccaggggtgcagagcaaattatcattttggtcccaggaccggctcctcttcacacgaggatgaatttccctacttagtgccaactgtacacttgcatactccgaaaataggggcaagccgtgaataccagaggttacaagggcaatgttttattttattatgggctgaagctcagaaggctcccaatgctgaaacgctcgacctataaccccggagtcactttccaactgcgctctcacccagggtcattatatcccaaacggaagccaatcattacctgtaacaaggcctggaaaaaatagcaagagggctttaaaagttcacctaagaaacaccgaaacggggtggggagtgggtggcggggcttcgatggataaggccaaccttaaagcatctcggactcaaacattttaaaagccaaaatacgtacaaagacccttttccctggaagaccccaggcagagagaggcacacagacactcagtcatcccgacagcatggggtgccaagggttccctaagaccagcagccgggatcgaagctccgatgtgtccggggaaggtctgggaagccaggccaggtccgcattgtggccgggcggtgcacgcagcccctgctcccgggcccctttctctccccctccccacgaccaggcctctccccgctcctctccccttctcccttcctccgtccctcccctccccctagacacatacaacaaggccacctccccccgaaccccaccaactttccagtgcccccactcttcccacctctcaggagcacacagaagctgcaggccaggaggctcctcaggacggcccccatcttcccttctcgcgttctcttctctcaccggcgaggggtggccagaagtgggggaggcgaggagccggggcggccgccgcagcggcagggctgcacgctcatacttcccagcttcccagcgagagaagaaagaaaggggcacgtcaaggttccgcgcgcgccgccgccgccctctctaccgcgccgctcggccccgggctcgcgcgacgccagcgtctgcttccatcccgccgcctcctcccccggcgccccgcttcccccgcgcagctcctcattcagcctctgcctcgcgcagcggcgcagggatacggtcggcaccgcctcctagggtcgccgcgaccgtgtccctgcgcgcaacgagccccttctcccggtactgcctcctgtacggccagggaagggagtcggcaaccgcacgcacagcctctgcctgagaccctgggagaggttctgggctagcagaggcgaactgggagggaaagcctcctcccggtggcgcattccagcgggattctttcccggaccggccgcttcggccctccccgcggagggcgtgaggcggcgttgaacaacattggagccggcgtggtcgggactactttctgcggctcggccgggcagccgtctgccccgctctttgtgcggccgccgccggcagggccaggtggggctccggtctcgcgcccccagccacctgagactgcccagccgcggtgcacgcgcggggagccacggcggatcccgttgcggggtgatgagctccgtcttcggggttggaaatcggtttcagcatcctttttttgggagggcggaatttttgaacgctgtttacaccggctttcagcgtggatctggtgaacgatattaaaacgccaattcaaaactgagattgtcatttttctcccgccttcccagaaatacaaactgcccccagaattaagcccgaccagctaaagatttctaaactggcagataaaattccaagataaatgcctcaaaacctaagagcaaagggacaattggacaagactatttaggattttacaagttgcatataataacgaatgtttggcatgcttcgattatcaattctcagcttgagaaggaaaagattccctagaatctcagactgtgcacagcctctgctactcccagtgcattgggcattcaggagtaatggcccagacgccccctgaaatcacctgccaggctttcgtctgggcagaggcgctccaacagttaaccctaatggagccatcagatgcatcctgcccagctgtcacacgcccttacctggaggcagatgggcaagaaagtggagctgctaccacaatgttaacaagtacctcagtgacattggagttcactagtgcttgaacacaagttatcatatttgacactcaaaactaccctggggaaaggcaggttttgttacttattctttattgcacagaggagcaaaatgagaacctgagaggttaatgacttacccagggccactcaagtaatgaatagcagtacctcagcccaatccaggtctctgacttaagccactccgctccttccaagaaatgcgcgctgaaccaaaggtgctgcaggtttgtaagtagatggacagcagaaacagccaaatcactttctcccaaattcacctgaggtctagtcaccgtttatttaaatgacctgcttctaagaaccaagtgagttttgtattctggcttcctcaaagcaggaaactgggccgggggcgggtggctcaggcctgtaatcccagcactttgggaggccgaggcggacagatcacgaggtcaggagttcgagaccagcctggtccaacatggtgaaacccccgtctctactaaaaatacaaaaaaaattagccgggcatggtggcacacgcctgtcatcccagctgctcaggaggcagaggcaggagaatggcttgaatccaggaggcgcaggttgcagtgagccgatatcgcgtcattacactccagcctgggcaacagagcaagattgcgtctcagaaaaaaaaaaaaaaagaaaagaaagttaaccttcactttcacaggccccttccaatgtctggggaggggcctttatggtatgttcacatggtcctatttgcaaaacaaagataattttgaattcctcttctgtataattgtattatacaaaattgtataagcttcaagtcccacaaagcctggatctgtccctatttataatagaaaatgcggtacaactggccgggcacggtggctcacggctgtaatcccagcactttgggaggccgaggcaggcggatcacgaggtcaggagatcgagaccatcttggctaacacggtgaaaccccgtctctactaaaaatacaaaaaattagccgggcgcggtggcgggcgcctgtaatcccagctactcaggaggctgaagcaggagaatggcgtgaacccgggaggcggagcttgcagtgagcctagatagcgccactgcagtccagcctgggcgaaagagcgagactccgtctcgaaaaaaataaaataaaataaaaaagaaaatgcggtacaacctaaatctcctcagactatcaacctaagtaggggaatgagatattacacactgctgaaaaataataatttagaggattatgcaacagtgttgaatgtttatagtgagttaagctttttttttttttttttttttttttgagacggagttgtgctcttgctgcctggactggagtaaaatggcacaatcccggctcaccacaacttcctcctcccaggttcaagtgattgtcctgcctcatcctcctgagtagctgggattacaggcatgcgccaccacacccagctaattttgtatctttagtagagacgggctttctccatgttggtcaggctggtctcgaactaccgacctcaagtgatccgctctccttggcctcccaaagggctgggattacaggcgtaagccaccgcgcccggccgagttaagcttttaaaaagtgaaagtgcatgtacatttgattatagctatgtaaaataaaaatatatataatatacaaacataaatgcacacacatatatatagcacatatttgagcaaagaccaaaagtaagtgcactaaaataggcattaggatggtgaaataatatgagatgtagtttgcttttctgttcttcaattttgtttaatgtactatatatttactacaaatttttaaaagatgcttaagtgaaaatctataggttaagcttaagccctagagagaatgccattattactgcataactaattttgtttctcattcttttaagtgccaatcagataccaatcactctgttaagtgttggggatataaagatgagagtaatcatagtccctaccctcaagaagcttacagcctagtttggaaacactgattaataaagtgagtaattaaaatattaaaatctgcagggcacagtggcatacaactgtaatcccagcactttgggaagtcaaagtgggcagatcacttgagcccaggagctcgagaccagcctgggcaacatggcgaaaccccatctctacaaaaaatacaaaaattagctagacatggtggcgtgtacctggagtcctagctattcgggaggctaaggttggaggatcacttgagcctaggaggccaatgctgcagtgagctgtgatcttgccactgcactccagcctgggcaatacagtgagaccctgtctccaactaaaaaaaaaaaaaagacaaaattgctaagtgtagagatgcttttctgcctagacaattcaaagaagggaaaaaagggccaggcgcagtggctcacaactttaatcccagctactcacgaggctgaggcacaggaatcacttgaacccaggaggcgaaggttgcagtgagccgagattgcgcccctgaactccagactgggcaacagagtgaaactctgtctcaaaaaaacaaaacaaaacaaaacaaaagaagggaaaataaccctagcgctgaggttggaaatacaaatcagactttgccaggccaacaagactgaaaaaaaatttcaatcacaatagtaggtttaaagacactgaatcattagagaacttagtatgttggggatttgaaagtagattcatatagctgatgcatggaatgcttttagagaatgtcaggaattgaggcaggaccattaaatagctattgattaataaaaaccttttcaagccatgctaagaagtttagattttagcatattaacaatgcggacattgaagaattttgcacattgtacagaagtctatgaaaggggcaatcaggacagcagcgctgaggactgaaaagacatcatggatttaaagaatacgagattaaaacaggacttttagttgtgaattgagagagaaacagagagtaatgggagtctcctttacaaagaaaagaaaacctaagaagtatttcaagaaggagtgggtaataagtttaacaatggctcttttgtattggaggtgtctatgaaacatccaggtggaggccgggcgcggtggctcacgcctgtaatcccagcactctaggaggccgaggtggatggatcatctgaggccgggagtccgaaaccggcacggctaacatggtgaaaccccatctctactaaaaacagaaaaattagccaggcatggtaacacgtgcctgtaatccgagctactcaggaggctgagacaggagaattgcttgaacccgggaggcggaggttgcagtgagccaagatcacgccattgccacccagcctgggtaacagagtgcgactctgtctgaaaaaaaaaaaaaaaaaaaaaaaggccgggcgcggtggctcacgcctgtaatcccagcactttgggaggccgaggtgggcggatcacgaggtcaggaggcccagaccatcctggctaacacggtgaaaccccgtctctactaaaaatacagaaaattagccgggcatggtggtgggcgcctgtagtcccagctactcgggagaatgaggcaggacaatggcatgaacctgggaggcggaggttgcagtgagccgagattacaccactgcacactccagcctgggcaacagagtaagactctgtctcaaaaaaaaaaaaaaaaaaaacacttattgaaattgctaccactggccgggcacggtggctcactcctgtaatcccagcactttgggaagccgaggcagacggatcacgaggtcgagaaatcgagaccaccctggccaacatcgtgaaaccccgtctctactaaaaatacaaaaaaaaaattagccggtcatggtggcaggcgcctgtaatcccagctacttgggaggctgaggcaggagaatcgcttgaacccgggaggcagaggttgcagtgagccgagatcgcgccattgcactccagcctgggcaaaaagagtgaaactctgtctcaaaaaaaaaaaagaaagaaagaaattgctaccactaaagaaggtatgattagtaatggcaaatgcagtgttaactgttaacaacagagagtctgctgtgagaagtgctgaaaagagggcattgtgactataactttctcgaacgtcattgatgggaacatacattatgccagtgttttagaaaatcagtctgggagtaaaatacatacacctttaaactgaaacgctggccgggcgcggtggctcacgcctgtaatcccagcactttgggaggctgaggcagacagatcacctgaggtctggagtttgagactagcctgggcaacatggtgaaacccctgtccctactaaaaatacaaaaattagctgggtgtggtggcaggcacctgtaatcccagctacttgggaggctgaggcaggagaatcgcttgaaccccggaggtggaggttgcagtgagccgagatggcgccactgctttccagcctggcaacagagtgagactccatctcaaaaaaaaaaaaaagcctacaaaaatgacagttttcctggttcaacctaatcaaaagaacctgaagcctgctttttaaaaaaaatcacagataaagtgcacaaaatagtcattggtgactttaagccaaagcagtttcagcagaggtatgagatccaaagcaaaagtgcagtgaattgagaaatgaaggggaaacagggagggagggcagtggtttttcccaaatcttattgttaaaggaaagagaacacttgggtggctggaaaggaatgtgaggctggaggaatctgggagttgacttagttagggttgattgcttactttgtttttaagtttgagaggaatgtgatcatatttgtaacctgaagtaagtgatcaaataaagaaggagagtgaggaaagtgattcagagacttcaagaggatctggagcctagcagaatggatcagccttggatgggaggaggagcaggaggatttccacttctggaggagaggagagtcagtgtggctgcttgaccttcagctctcctttctccactcccactttcacagactccttccagaggccttgggagggaccatggcaatgattaggatggtcatatgtttttatactacttgcaaaaccaagattgttttagtattcattttctttaaaatatctccttctccagttgtatatgctcagcactacaaaacctgaatctgcccctagtagctataaataggtttcatggggaagggatagtggagacaagatttgattgccttcatttacataaaaacagaaagcaaagtctacattgagagtgaagtaagaaagaatatggtggtcggggaggaggtcaggaaagtgacaaaggtttggagaagctgggaatggaagagggagttgacaaaggacacattataggatcctctaacagcacagaggatgctgctataactccctaccagaaatgtggtgtatatcatgaagagtggccttcttgcctctatttttcttttttcttttttgagacagagtctctctctgtcaccaggctggaatgcagtggtgtgacctcggctcactccaacctccacctccagggttcaagcaattcttatgtctcagcctcccaagtagctgggattacaagcgcgtgccaccatgcctggctaatgtctttctttcttcctttttttatttttatttttttattattatttttttaatagtagagatggggtttcaccatgctggctaggctggtcacgaactcctggcctcatgatctgcccacctcggcctcccaaagtgctgggattacaggcatgagccaccgtgccctgccttctttctttttcttttcttttcttttctttctttttttttgacagtcttgctctgtcgcccagactggagtgcagtggtgctatgtcagctcactgcaagctcctcttccccagttcacgcctactgcctcagcctcccgagtagctgggactacaggcgcctgccaccacgcctggctaattatttgtatttttagtagagacaaggtttcaccgtgttagccaggatggtctcaatctcctgacctcgtgatccgcctgcctcggcctcccaaagtgctgagactacaggtgtgagccaccgcacccggcttttttttttttttttttgtatttttagtaggggcagggttacgccatgttggctaggctggtctcaaactcctagcctcaagtgatccagacttgagggacaagtgttccagactcccaaagtgctgggattacaggcatgagccactgcgcctggcccatctatttttccctccttcaatgggaataacacttgttcctagctgcaccatgaaaatatcacatcagatgcctaagaagaattcactataattagaaaataagtatactttggggccaggcatggtggctcacgccagtaatcccagcactttgggaggccgaggtgggcagatcacctgaggtccggagttcaagaccagcctgatcaacatggagaaaccccgtctctactaaaaatacaaaattagccaggagtggtagcacatgcctgtagtcccagcttctcgggaggctgagacaggagaatcgcttgaacccggcaggcagaggttgcggtgagccgaaatcactccattgcactccagcctgggcaacaagagcaaaacctcgtctcaaaaaaaaaaagaaaaaggaaaagaaagaaaagaaaagaagtaactttgttttcaataatatttttcttttttcaacatcagctatataaaccccctgtaaagtctattaaaacatgaaaaataaattaaacgctatacattaaatttcttacgtttgtcccaaacaggatgaaaggatatctgcaatagagggtaacctggaaaagggaagcggagccagagaaaacagaggagggagtccattcaggggagaggatgatggcggtgttagaatattggttacatccagcctggcatggtggctcatgcctgtaatcctagcactttgggagtccgaagtgggtggatcacaaggtcaagaggtcaagatctgcctggccaagatggtgaaaccccgtctctactaaaaactacagaaattagctgggtgtggtagtaggtgcctgtaatctcagctactcaggaggctgaggcagtagaatcactggaacccgggaggcagaggttgcagtaagccgagattgcaccactgcactccagcctgggtgacagagtgagactccatctcaaaaaaaaaaaaaaaaccaaaaaaaaaaaagaatattggttacatcgagaaggattaatctactaagtaaatatattaaagataatggaatcagagtttctaactatcagagaaggaagttacaaatacaacaaagataccttggtgccaatggcaatgaaaatggtggagtaagaaactctaagggtagggaactctcttcctttgcagaaacactgaaaaaactggcaaaagtcatgagaaacaactttattagaactctagaagatagtcaaaggtttacagcaaccaagctaatgcttaataaggataatgggcactgaatcatggtaggagaggtttgtcgtgttttaccttacccttgtccaatccccctgcccagtgcagcagcagtctagaagacagcagcccatgctctcagtgcaggttctcagtttgggaggtgtgttaggccattcttgcgctgctgtgaagaaatacctgagactgggtaatttacaagaaaagaggtttaattggctcatagttctgcaggctgtacagaaagcatggcaccaggatctgcttctggggaggcctcaggaaatgtttactcatcaccgaaggcgaagcaggagcatgcacgtcacgtggtgagaacaggagaaagagagagagtgagggcaggtgccacacactttcaaacaaccagatcacatgcgaacccagagcaagagcatcaccaaggggatggtccaagccattcatgaggaatctgcccccaagatccaaacacctcccacccagccccaactccaacattggggattacatttcagcatgagatttgggtgggaacaaatatccaaactatatcagaagggaatggagggaatcttgttcctgagaaattgtgttcataggttttaatctgtttgggggatccccaaggggactaatgcagggtacttgcctttgttccacttacctcaaaactctctcaggatagaaaagttgctttgtggaagaggtttctcaaaaacattggacagccaatgaataaagcccagatgcctagagcaaaagataacagctgtggcaaaaaaaatacacttgtagaaagcctgagaagaaaaacttggggattgatatacttgcggaataaaggctctgaaaagcccctggttatgtaggggaatcaaaaaggcccaggccaggatacatcctcagaaaaggtctgagaacaccataggcttcacctctggttgatttttaggcttagcacaagtaagaagtgaaggctaaggcagagttataaatggtgtggctagtcagccgggtgcagtggctcacacctgtaatcccagcactttgagaggccaaggcaggcagatcatgaggtcaggagatccagaccatcctgtccactatggtgaaaccctgtctctactaaaaaatacgaaaattagccaggtgtggtggcatgcacctctagtcccagctactcaggaggctgaggcaggagaattgcttgaacccaggaggtagaagttgtagtgagccgagatcgcgccactgcactccagcctgggcaacggagtgagactctgtctcaaaaataaataaataaatggtgtggctgagcattgaagtattggcaccaacacagagccaatttgcaaagacctgatggtactttttcttttttgcctctaggagtttaagaaaatctttgataaaccattagctgactactatgctaaaaaaacagagaccacacaattcaaagaaccgtataaaatagtttagaaaagtcactaaacaaacaaccacaacctacagagagcaacaaaaaatcctggaatggggagaattttatttccagagttaccgcattgttatattcaaaatgaccacttttcaacaaaaaattatgaggcatgcaaaaaacaatgaagtgtgccctgttcataggaaaaaaaaattaacaaaaacagtccttgagaaagcataggcattggacttactagacaaagacttcaaatcaactctcttaaatatgctcaaagaactaaatgtagctggccaggtgcagtggctcatgcctgtaatcccagcacattgggaggccaaggcagatggttcacctgaggtcaggagttcaagaccagcttcaccaatatggtgaaatcccatctctactgaaaatacaaaaattagccaggtgtggtggcatgtgcctgtagtcccagctactcgggaggctgagacagaagaattgcttgaacctgggaggcaaaggttgtactgagccgagatcgtgccactgcactccagcctgggcaacagactgagactctgtctcaaaaaaaaaaaaacaaaaaaactaaaggaagccatcatggacaaagaaccaaaggagaacagtgtctcaacaagtagaaaatatcaataaaggcagaaaaattatttaaaggaaccaaatagaaattctggagctaaaaagtgtaataaactgaaagaaaaaattcgctagacacattcaacagcagatttaagcagtcagaaatatcagaaaactgaagataagtcaattgaaatcatccagtctgagaagcagaaagaaaaaagaatgaagaaaaatgaacagacactaagagaattgtaggataccatcaagtatatcaatatatgcataacaggaatcccagagggagaggagggatagaaaggaggagaaagaatacttgaaaaaaataacttaaaaacttcctaaattttttttttgagacagagtctcactctgtcactctgtcactcgagctagagtatagtggcatgaacttagctcactgcaacctccaccttccaggttcaagctattctcattcctcagcctcctgagtagctgggattacaagtgcgtgctaccactcctggctaatttttgtatttttaatagagacagggtttcaccatattggccaggctggtctcgaactcctgacctcaagtgatctgcccgcctcggtctcccaaattgctggggttacaggtgtgagtcactgcgcctggtcaacttcctaaatttaacaaaataaatgaacatctcaacagatacacaggaattacaaataaagaaacagagaaaactagaatgaccctgtgatgccatattaataggatatattcatataaattcacgattttcaatatatatggataggtatagaaataaatatagttgtaagtgtgtatatgaatatgtgcatgtatttgtgtacacatgaatgcacagatcctagctctgtctaccaagaaaatgtgttagttaaggcctactaataagcaggcaccgagacagaattcaatgtgcaagagatttattgggggagtgtgatagcctccagcatggtccctaatgattctcacctcttggtagtcacatccctgtgaaatcccctcccacactgagtaggactgacctattactgcagtgacagcatgagactttcaggctaaacaataaaagacatagtagtgtctgtgttgttctattgaaacagtcactgtagggggagaatcagctgccatggcatgagatactcaagatgccctatggagtcgtccatgtagtaaggaactgagacctccttccaacaaccaagtgagtcatcttggaagtagatccttgaggccgaagccaagccaccatatgactatgctttggctgacatcttcacagcaacatcatgagagatttcaagccagtgaagctgctccagaatttctgacctatagaaactgtgagataataaacacaatcgacccttgaaaaacgtggaggttagaagtgctgacctccactcagttgaaaatccatgtatagctttttttgttttgagacagagtctcactctgtcacccaggttggagtgcagcggtgcaatctcggctcactgcaatctcagcctcctgagttcaagcgattctcctgcctcagcctcctgagtagctgagattacaggcatgtgccaccacacccagctaattttggtgttgttgttgttgtttttgagacagattctcactctgtcgccaggctggagtacagtagcgtgatctcggctcactgccacctctgcctcctgggttcaagtgattctcctgcctcagcctctggaatagctgggactacaggtgcgcaccaccacgcgcagataatttttgtatttttagtagagatggggtttcaccatgttggtcaggatggtctctatctcttgagctcgtgatccccccaccttggcctcccaaaatgctgggattataggcgtgagccactgcgcccagccctaatttttgtattttttaaaagtagaaacagggttttgccatgttggccaggctagtcttgaactcctgacctcaggtgattcaccctcctcagcctcccaaagtgctaggattataggcctgagccaccgtatcagcccatgtataacttttgactcctccaaaacttaattactaatagcctattgtcaaccagaaggcttactggtaacatagttgatttacacatattgtttgttatatttattatatatactgtattcttacactaaagtaagctagaaaaaagaaaatgtaattttatttttcatgaaaatcttaaggatgagaaaatacatttacagtactatacagtacagtactgtactgtgcttatcgatattgcaaaattacataaagatggatactttgaagtaatgggtaatggtatgcagacctcaatctacagtacataccaagcaattccacttttttcttgtaaggtcatgacttttttctgcttcttgggagcacttccagcatcactagtggcactttgcatgggttccaggatgttattcaagggtttatggtattgcactaaatgcgataaaaaacgtgcaagatccacgagaaatcacttttcactgtgaaatgccatttactggaaagatcagctgctcacacagagatgagtagcatcccactgggttttaagcagatactcacaatacttgatctcatcacaatagcaataggaggtggctgtgaaattataacagtagtacagtatatacaacagttaattttatgcagttatgatttcatattgcatctttacatttgtttacatttatctagacgaaaatgaagccatgtatggtctgtatttgtgtgtgtaagttttgataaatttcaattttttggaatagatttgtgtataatttatggtagtaaatgacaaaaatagactagtatctacatatattttgtgcattcatgacatacctaactttttcttaatttttttgctatttctagggtatatggtttatcttcaagttttttcaaattgttgccaatctccaaaaaaattccaatatatttactgaaaaaagttcatgtataagtggacccactcagttcaaacctgtgttgttcaagggcaaattgtacttattttaagccactacattttgggggtaattgttacacagtaataggtaagtaataccagtagaaagtaagagaaggaagagagattcctcacgctgagatgcagatctgacatttctagaaggagagaagaatgaaggattggagtaggacaagtcttggactactgcattgttccaagaatgaatttaccaagcagattgggagtcccaagccaaagttgtcccctagaggattcctgtattttgccagaacagacctaccttagtacccctgctgggctcaggcactgactgggaataaccctttaaaagttggcctcagtgtgaatagggtgatagatttaggaggcagtagttggggctatctgtcaattatgctccccacagcaggagaactgagtgacacatttcatagctatcacagcaggcctggaagagatgacagcccaatagcaatgagcagagctagtgtcaagatgttagcttctttttttttttttcagacagagtttcgctctggttgcccaggctggagtgcaatagtgagatctcagctcattgcaacctccgcctcccgagttcaagcgattctcctgcctcagcctttcgagtagctgggattacaggcccccaccaccatgcccagctaattttttgtatttttagtagagatggagtttcactatgttggccaggctggtctcaaactcctgacctcaggagatccacccacctcagcctcccaaagtgctgggattacaggcatgagccatcatgccaggctcaagatcttagcttataaataatattttccttgaaaaggaaccagggctccttagagaaatggctgatcccacatctgaggcaggaaaagtataagatgagtctggaacagctggtagtgacagagcaaggaagggctcaagaaatgacagaaacatgtgaaaaggacatagatgccagcttgaagggacttccactggtcaaatcaggaacaatttgagcatcaaaattaaaaatggcagtaagagattataacccattgaataaaataaggaattatgggttcaaacagacataaagacatatacatacatacatacatacatacacacacacacatcaaaagtttgatgaggaatgggatatttacgtggttcatggtggacagatactgcccagatcaaagaaccaaagtcaaaatcattagtaataggacaaattgaaattatgtgctacctgataggatataagaagaaagcagttatcacttctatggtattcctctaaaaggtgtataacctgaatgtaatcatatgaaaacaccagtaaaccccaaattaagggacaagttacaaaataaccgacctgttttcttcaaatgtatcaaggtcatgaacgtcaaggaaagactggggaattgttccaggctgaagcagactagacagacataaagactcagaacaatgtgtgattctgaactggatcctattgctacagaacattttattgagacaattgacaaaacttgagtgagatctgaggattaggtagtgatcatgtatcaatgttaattttctaattttgatggttgcactgtgattacgtaggagaaggtctttatttgtaggaaacaatactaaaaatatttggggtggtggagcaccaagtcctcactctcaaatggtcaaggacaaaaagtcctttgcactgcacttaacttttttattcaactttgcaaatgtttcaaaataaaaaaataaaagtatgcatgctatttgaaagataaacctgttataaatataaggttttatcatttaaatccggagagctctttaacatctttaacttgatgagtagctaccctctttcttttctacccgtccaagcttactttaattcattcacaagactgaatggaatctcaacatttaaatacttaatctctttctttaatctttggcaccaaggaactggatttccccagttgtatgagtcacccgataacaaatttcccagcttaaatagttttaaagttgtactattagtaaggcaacactgttcattgtgtctcagattcaaggatttatagtaacaatgtgttttagcatgcatattctttttcaacatatacgtttttctttgatgccgtaaaaagtctttctgatgttgaacagttttaatgcagttatgccatgatggaaccacccctctcctcactcccagaaaatcacacagcttgatatgtttttagccttcatctgaattgtaaaacactgaattcttacagttttctaaaagaaaaagaaaaaaacttgccattgctattttgggagcatttgtccagataaataaaacacggtcctgatcccaccctgcctgtcctcgcatttctgagagtgaagatacagaacactgcagtcaggggagaaaacatatttttttttccttccctgtcagaatctgttccattgggaggtgaagtatatgaacccaatttttgccttggagataaagagaaaaaaatcaattctaccaagatttactttatgtgaaagcacttaagcagattccctagacatgtgtttctgaagggttgcaccctccagccatctgacttttggccaagtccagagacattttaggttgtcagaactacggggtgggagatgctactggcatcttgtgggtagagggcagggatgttgctaagcatcctacaacatactagacggtccccacaagcgagttggccaagtgcgatggctcatgcctgtaatcctagtgctttgggaggtggacatgggaggatctctcgagcccaggggtttgagaccaggccaacaaacagtgagatctcatctctacaaaaaaataaaaaattagctgggtgtggtggtgcatgcaggttgtcccagctattcaggaagctgaggcaggaggatcacttgagcccaggaggtcaaggctgcagtgagctatgatcgcaccactgcactccagcctgggtgacagagcaagactctgtctctaaaaaaaacacaaaggcctagctcagtggctcacctctgtaatcccagcactttgggaggctgagccagcaggatcacttgagctcaggagttaaaaccaagctgggcaagacctcgtctctacaaaaaagaaaaaaaaaaaaaaaaaaaaaaaggccaggcgcagtggctcacagctgtaatcccagcactttgggagcctgaggcgggtggattccttgaccccaggaggtcagctgcagtgagctgtgattgtgccattgcactctagcctgggcgacaggaatgagaccttgtctcaaaaaaaaaaaaaaaaaaaaaaaaaaaaaaaagctgttagtgccaaggctgagaaaccctgtccaagattaatgcagagtacagagaagaaagaagacctcaggaggaggggggaaacaccaagaaatacaaacacaaaattaaaagaaaaaaaaaaacctaataaacagtgaatttcacaccaatttataaagatacaggattttagggattaacattcctatttggtggcctttcaggatattgctaagaggactttaaggtcattttgagtttttctactactacatttttatcaattctttcaccaagcatttcttgagcacctactgtgtgccagaggctgaggacacaaagatgtgagcttttctcttccctgggggagctgggagattttagtggtggaaatacctataaatgaagaattggaattccaaggacaagaggtaaagggcaagaaaaagagttcttctctataccaagcactcctgcttacctccagtcatcttcattccgctctcaccagtgagtgttattcccttttcacaaaagaagaaactgtgagattaataacaagagcagacaagcaagtgtcgggccctgttctcaatgttttaattaatttatttatttttaaattgttgttgttgttgttgttgttttgagaccaaagtccccctctgtcgcccaggctggagtgcagtgctgtgatttcggttcactgcagccctcgccttctaggttcaagcaattctcatgcctcagcctcccgagtagctaggattataggcgtgcaccaacgtgcccagctaatttttgtatttttagtagagaccgggtttcaccatgttggccaggctggtctcgatcacccaacctcaagtgatccacccgcctcagcctcccaaagtgctgggattacaggcatgagtcaccacgcccagccctcagtgttttctcatgtaactcattttattttttttattaactcattttactttcacaactatcctttgaggagggcattaatatcatcaccttcgttttacatccgtgggtgctgagggaccaagcgtttaggtaacttgtccaaggtcccacagccaggctgtctggccgcagaatccatgcccttcacaatctacactggtgcttctcttatgcttcatccaaggaagaaaatggtagatctgggcttaaaagccagagtgtgactggaaacccaatgctcttctgctacatgatactctcccctgttctagaaaagagctcaacatgctataggctcacaggtgtctgattgcgcctgaagaagtcaaagtcgatttcagttggaggtagcatctgagctcatagtggaggtatatgccagaaggaaggtcagacaaagggagaaggacaagaacagctggaatagaaaacaataaacttcaccatggctagcagtttgttgtggttggaatgtaagctataccagagcaaaggactaaagagaacctagaggccaggtgcagtggctcacacctgtaatcccagcactttgggaggccaagatgggaggatcacttaagcctaggagtttgagaccggtctgggcaacataaagagacctcatctttacaaaaaaataaaattttaaaggcatggtggtacacacctgtagtcctatctactcaggaggctgaggcaggaggatcacttgagcccaggaggctgaagctgcagtgagccataatcataccactgtactccagcctggataacagagcaagaccctgtccccaaaaaaaagaaaaaaaaaaaagaacctagagaagtaaataagggtaagatcaggaagtgtgagctttaacttccaggcaaaaggtaattattaaaagaccataaggaggccaggcgtggtggctaacacctgtaatcccagcactttgggaggccaaggcaggtggatcacctgaggccaggagtttgagaccagcctggccaacatggtgaaaccccatctctactaaaaatataaaagttagccaggtgtggtggcctgtaatcccagctactcgggaggctgaggcaggagaatcgcttgaacctaggaggcagaggttgcagtgagccgagatcgcaccactgcactcagcctggacaacagggtgagactcggtctcaaaaaaaaaaaaaaaaagaacataagcagagcatgatctgacttaacatcaacttgatatcaacccatactttggagtctagaacaaatatttcccattcctttctgtccacatgccctgctcttgttctttttaatctcactttacctggtttaaatatttatttatttatttatttatttatttatttatttatttatttgagactgagtctcactctgtcgcccaggctggagtgtggtgggacaatctcagctcactgcaacctccgcctcccaggttcaagtgatactcgtgcctcagcttcccgtgtagctgggattacaggagcacatcacatctggctaattttcatatttttagtagagatggggtttcactatgttggccaggctggtctcaaactcctggcctcaagtgatctgcccaccttggcctcccaaagtgctgggattgcaggtgttagccacaagcgcctggcctaaatgtgtataatgtgggagaagaagacgaaaaatctggactgcctttcccctagcaattctcagcagctctcaatgccactcaagcctgctgacctgcaggagttattaatgatgacagagtgctgttgaaagcaataagcaatgtgatgaaattacaaccaaaatcacgctttctagattgatgtggttgggtacattttgagtgacagtggtcctattagtaatactcatatagggctttatagtataccaagcgtttttacatgcactctgttgtttgatcatcaaaacaaaccaaggaggtaggtgttatcccatttcacagatgtggaaactgaagcttccagagcttgtttgggtaagtagaaagaatgaacacagaactccagacttccagtctcatcctctctccttgccttcctgccttgccttcctccctctttaacaatattttcttttgttttgtttttgtttttatatgttttaattttcccgtatgagtgggacagcaaaagccaggagacttgatttgtcctcccctgtcttgtgtagggttagcccactgtggcccctacgcttgctaatgcagccccgtgatgtttttccagatccctcctgtcacccttagtggctcttgatcctgatggatcaagagtgtgcttcttggctaggtgcagtggctcgcacctataatgccagcactttgggaggccaaggtcgggggaacacttgaggtcaagagttagagaccagcctggccaacatggtggaactccatctctagtaatacaaaaattagccgggcatggtggcgggcacctataatcccagctacttgggaggctgaggcaggagaactgtgtgaacctggaggcagaggttgcagtgagccaagatctcgacactgcactccagcctgggcaacagagtgagactccatctaaaaaaaaaaaaacaccaccaccatcaccaacaacaacaacagaaagagtgtgctctttggcatggcacagaagactttctgcgtcctgtcttctgtcctcctgtgaccaaccatcctggtttgcccagaactgagggacaggggactttcactgctaaaactgggacagttctgggcaaagtggagcagtcggttactcttgttctccctctccagctgcctaatctgccactctcaaactccaacttctaagatcccagcaattgctgtcctgtttcaaccccctgcctttgcttatgctgttctttttatcgaaaacacatacctctaccttctctcagccacttcctactttttctttaaaactatgttctggggccgggtgcagtgtctcacgcctgtaatcccagcactttgggaggccgaggtgggcggatcacgaggtcaggcgattgagaccatcctggctaacacggtgaaaccccatctctactaaaaatacaaaaaattagccgggcgtggtggtgggcacctgtagtcccagctactcaggaggctgaggcagcagaatggcatgaacctgggaggcggagcttgcagtgagccgagatgacgccactgcaccccagcctgggtgacagagcaagactccgtctcaaaataaataaataaataaataaaactatgttcttaaatgtaggtactgatttctttctttcttttcttttcctttttttttttttttttttttttgagacgcagtcttgctctgtcacccaggctggagtgcagtggcatgaacttggctcactgcaacctccacctcccgggttcaagtgattctcctgcctcagcctcccgagtagctgggattacaggtgcatgccaccacacccagctaatttttgtttttagtagagatggggtttcaccatgttggccaggctgatctcaaactcctgacctcaggtgatccacctgccttggcctcccaaagtgctgggattacaggtgtgagccaccacacccagcttgtttctttcttttttcaattaaaaaatatatatatatggaatgctggtggggctcggtggctcacgcctataatcccagcactttgggaggctgaggcgggcagatcatgaggtcaggagtttgagaccagcctgaccaacatggtgaaaccccttctgtactaaaattagccaggcatggtggcatgtgcctgtaatcccagctaaggctgaagcaggagaattgtttgaacccaggaggtggaggttgcagtgagccgagatcacgccactgcactccagcctgagcaacagaaaaaaaaaaaaaggaatgcttcacgaatttgtgtgtcatccttaagcagggggcatgctaatcttgtatcattccaatttttgtatatgtgctgccgaagccatcaccaaagcatttgtttctttgactgtattgtgaactgaatgtttgtgccccccaacaattatatgttaaaatactaacactgaaggtgagggtagtaggaggtggcatctttataacgtgattaggtcataagggggagcccttacaaatggtatcagtagataccatttgtggatatctactgtgggtgcagtggctgatgcctataaccccagcactttgggaggccaaggcagacggatcatgaggtcaaaagatcgagaccatcctggccaacatggtgaaacctcgtctctactaaaaatatgaaaattagctgggtgtagtggctcacacctgtagtcccagctactcgagaggctgaggcaggagaatcgcttgaatccgggaggcagacgttacagtgagccgagattgtgccactgcactccagcctggtgacagaacgagactgtctaaaaaaaaaaaaaatcaaaaacaaacaacaacaacaacaaaaaaaaacaaatggtattagtttccttataagaagagacacgagagaggtgatatttttttctctcccatatgaggatacaatgagaagatagccatctacaaactagaaagagtgccctcacaagacaccagatctgtcagccacctaatcttggacttcccagtctctagaactgtgagaaatacatgcttgctgtttaaaatgtttattctttaagccacttgctctatggtattctgtgatagcattctgaatgaaaacaggctgtctcttccagaatatgttatgcttctttgtaaggcatcttttcatcccagtctgttgtagaattcctggcatgtagtaggcaagtaataaagctatgcaagcagatcaaatggtgctaggactctgtaagaatttttctcagttcccttccacagatctcttgccagagagaaaaggttcccctcagggcagcaaggtagaagactcaagaagtgagcagagttgagatcatagaaggcttggctttccatgcttaggggtgcaggctttcatgtgtttgcaatggagagtcattaacaggacaaaaaaaaaatcggtggccctttgtctatgaactcaataagagcctgggcaagaaaaaaagaaatgtaggtaaccagcccagcaagaatagcaacaaagaggcaacactcaagcctcctagtatgtctagagttctgtacaccctcctcagggctagaagggcctcagtgtctgagtctacctgagcccacaggtggaagaacaaaacaggaaacatttcctgacccaagaaaatagtttaaattgcaaaggcacacattacagttaggtacaatataaacaattccctggcacatttattgtcaaactttagtgtacgtcagaatcacctgtagggcttgttaacacagagattgctgagtcccatcctcagagatctgattcagtaggtttgagatgtggcctgggaatctgcatgtctaacaagttcctaggtggtgctgctggtctggagacaatgcttctaggaccaccactccagaacccactccacctctctctcatcaacggataacttgcctgtccttgattcaaggcttgcctctttccttgctaacaacatccctcaatctcctttcagggactcattctcctttggacattttcagatctgtgctatgggtggggaggacaaaataacaccttccctcatcagagctaccttaaccctcactctacttctggctttttcttacaacttcaaaaattgtttgtggccgggcgtggtggctcacgcctgtaatcccagcactctaggaggccgaggcaggtggatcacctggggtcaggagttcgagaccagcctggccaacgtggcaaaaccccgtctctactaaaaatacaaaaatcaggcgggcgtggtggtgcgcgcctgtaatcccagctactctggaggctgagacaggagaatcgcttgaacccaggaggcagatgttgcagtgagccgagatcgcaccactgcactccagcctgggtgacagagcaagactctgtctcaaaaaaaatacaaaaataaaaattgtttttattgactactttcattttctcaccattcattctctctttaacctcttgtaatctttcttttatcctgtctagcactctgttattcataaagagtatttataagctgggcgcggtggcttatgcctgtaatcccagcactttgggaagccgaggcaggtggatcatttgaggtcaagagttcgagccagcctggccaacatggcgaaacctcgtctctattgaaaatacaaaaattagttgggtgtggtggcacgcgcctgtaatcccagctactcgtgaggctgaggcaggaggatggctagaacctgggaggctgaggttgcagtgagtggagatagtgccactgcactccaacctgggcgatagaatgagaccctgtcttaaaaaaaagaagcacaagaagagattgcccttcttgcctttgagtacagttttcctgaagatgtgaatggttgaagctgtgacagccattttgttagaatgaaggcttacatctgagcacaaaacgcaacacattgaggatgccaaagcagaacgttgagaagcatctgggttatcaacatcattttgcaactaattaaccaattccagaattacctgtcttcagacttcttgctatgtgtaatgataatcccctatttttttctttgagctggtgcttttcttttttctttttctttttcttttttttttctttttgagacggagtctcgctctgtcgcccaggctggagtgcagtggcgcgatctcggctcactgcaagctccgcctcccgggttcacgccattctcctgcctcagcctcccaagtagctgggactacaggcgcccaccaccgcgcccggctaattttgtttttgtatttttagtagagatggggtttcaccgtgttagccaggatggtctggatctcctgacctcgtaatctgcccgcctcggcctcccaaagtgctgggattacaggcgtgagccactttgcccggccgcttttcttttcttttcttttcttttttttttttttttgagacagagtctcactctgtcgcctctggctggagtgcagtcgtgcgatctcagctcactgcaacctctgtgcctcctggattcaagcgattctcctgtctcagcctcctgaatagctgggattacaggagcccgcgaccacacccagctaatttttgtattttttttagtagagacgggttttcaccaagttggccaggctggtctcaaactcccgacctcaggtgatccacccgcctcggccccccaaagtgttgggattaaaggagtgagccaccgctccaggctcacccctttagaatctacttgctactctgagtaccttcttacaaatgcaattgcggtgcttctcacagattcatttaaaaaaaaaaaaaaaagaggccgggcgcggtggctcacgcctgtaatcccagcactttgggaggccgaggcgggcggatcacgaggtcaggagatcgagaccatcctggctaacacggtgaaaccccgtctctactaaaagcacaaaaaattagccgggcgtggtggcaggcgcctgtagtcccagctactcgggaggctgagccaggagagtgacgtgaacccaggaggcggagcttgcagtgagccaagattgcgccactgcactccaaagacttaaagtccaatgttaaaaaagggagaaaattacccaggatattttgtatcctgagtatacgttatatagagattggtggtggtggtgatttttgttgcatttgggagttgctatgaaagttgagggactaattttttttttctttttgcttaggcaaactcctgaaaactacttctcttcctattttcatgcagagaaacttaatttctccttgccttttctccccctgtggagttaaaaatagtatggatgcatttattttgtgtcaatttccattaggatgcctgcagatactaacagattcttcaaagtccaaaaagcaacctcagattttcacattggggtaagtggaaaatagaaggcccttgattcctattaactaacctgattgggtatcaccattgttttcattgctaataattgttttccaatgagaatatgaatatttttattttaatggaagttttatacctacagtaaattcataggcattagttcattcactactaaaatgtatacttctctgaactcagacacacaggccatttaacaggatacatgtgacataataaattaaagtgacatgaaaatgaaagtttcatctatttagaactgcagagaagatttcaggttgtcagattatatgttattactaagtcttggttattgaggttagtgcagtaaattgattgagtgcttcatttaaaatactaattgagcacctgtctgtaaacagcagttaggcaatatgggtgaatactaaaaaggtaactttggtaatattgggaatactaaaaatatatacagagagaacgagcacgaaagtttcattaaagaaaagtgtaatggaagacatttgacatatacataagaaaaactcattaataatgaaaagcaaccatacaagaaatttagagaagcagagtgccgagggagtgggggcggtgggaggcggtaagtgctaagcatcggtcccctcagcagtttgaatgattttatgaagcaggtaagattccttcataggaagctgagagagggtgagggtaagtggaggggcttggatgatcacagtatgaaaaaatgggaaaaatggaaggaagactattctattcaagaagacctaacagcaaagccatgctcatggaccagtgactaggccaatctgaccagagcagagatttcagatgggaaaaagcgtgaaaatcatattttagtagcgttggaaaatatctaagatttcatcagcaagtttcctggaagagattgagactggaaggttagtttgatttatcagtgtctagtaaagttgaaaacacacatacgatatgttctagtcaatgcttggcaggaaacagaatgagctctcaccctgggtaattgaggacaattcaataaaagaactatttaccaaaatgtgggcagggttaatggcaaccttaaaaagcaacaagggtagcaatagcaggggagcctgggggacttcattgctgcccccaggcctgaagaggcaaagagagggaatggtgatcagaactgcagaacacagggagaatagcaggggcagtaggagagctccttgacaggaggcctttggtggaggaatgcagccaacccacagaggcccagcaggacgggagccaggagaataaatgcccagatcacactctcctcccaccctctgctttcctgctggcatcttccagaggccaaatccaacaagaagtcagagggaaaggaaattcatggctagcagttcataaaggtcagcttcctggggccaatgcagggaggaagaaagagaagatcagaggagcaaatggaaaacatccagtataccacgtgacccacaattctgttacaggaccacaacactaccccaaaggtagccattgggtcagggtttctgcactatagtcccatctgggttgccagaaatatgttacaaggaaggggtcccgatctagaccccaagagagggttcttggatctcgcgcaacaaagaattcagggcgagttcgcagtgcaaagtgaaagcaagtttatcaagaaagtaaagaaataaaagaatggctactccatagagcagcccagagggctgctggttgcctgcttttatggttatttttgaggttatgctaaacaaggggtggattattcatgcctcccgtttttagactacattagggtcacttcctgacgctgccatggcatttgtaaactgtcatggcgctggtgggactgtagcagtgaggacgagcagaggtcactctcgttgccattttggttttggtgggttttggctggctcttttaccgcaagctgtgtttgtttgtttgtttgttttgagacggagtttcgctcttgttgcccaggctggagtgcaatggagcgatctcggctcaccgcaacctccgccttccgggttcaagcgattctcctgcctcagcctccggagtagctgggattacaggcatgcgccaccactcctggctaattttgtatttttagtagaaacggggtttctccatgttggtcgggctggtctccaactcccgacctcaggtgaggtctcccaaagtgctcggccttccaaagtgctcggccttccaaagtgctcggattacaggagtgagccaccgcgcccggccttactgcaaactgttttatcagcaaggtctttatgacctgtattttgtgctgacttcctatctcatcctgtaacttagaatgccttaaccttctgggaatgcattccagtaagtttcagctcattttacccagcttctatttaagatggagttgctctggttcacacgcctctgacaattctactctaaatttcacaccgtatagaaacttccacgtgtgcaaaaggacaagcacaaatattgtcttgcagcatcgtttttagtagctctaaattggggaaaaactgaatgttcatcaatacggggctacgtaaattgaggtgtattcattgatagaatgtagtgcagccattaaaatgaatgaactggatatatataagcatttgtgtgtgtttgtgcacgcgtgcacatgcatgttttagagggatacatgtagtatgacatactgaataaaaatatttaaaacacacagaaaaagcaattgtatattgtttctacctacatgttatgtaatagaagtataaaaacatgagtaaggccgggcacggtggctcacacctgtaatcccagcactttggaaggccgaggtgggtggatcacaaggtcaagagatggagaccatcctggccaacatggtgaaaccctgtctctactgaaaatacaaaaattagctgggcatggtggcacgtgcctgtagtcccagctactcgggaggctgaggcaggagaatcacttgaacccggcaggcggaggttgcagtgagctgagattgtgccactgcactccagcctggcaacagagccagactctgtctcaaaaaaaaaaaaaaaaaaaaagagtaaaagaatatatgaagtcgcctgtaatcccagcactttgggaggccgagtcaggcagatgacttgaggtcaggagttcgagaccagcctggccaacatggcgaaaccctgtctctactaaaaatacaaaaaaattagctgggcatggtggtgtgttcctgtaaccccagctactcaggaggctgaggcaagagaatcgctggaacccaggaggtggaagttgcagtgagctgagattgcaccactgcactccagtgtgggcaacagagcgagactctgtctcagaaaaaaaaaagaatacatgaaatcagagaaactcaaattgtgatagtagtttcttctggtgaaggaagaaaagagaatgatatcagggaagatgaaaaaagagactgtattagtaaggcttctccagagagaaagaatcaacaggatcaatggatgcataggtagatagatagatagatagatagatagatagatagatagatagatagacagacagacagacagacagacagacagatgagaggggatttattagaggaattagctcaagtgatatggaggctgaaaaatctcatgacagtccatctgcaagctggagacccagggacactaggagcatggctcagtccaggtctaaaagccaaaaaaccagggaaactgatggtgtaattatccatcccaggtggaaggcctgagaacctggagtgcccctggtataagtcccagagtacaaagacaggagagcctggagttctgacttccaagggcagaagaatgtgtcgcagctccaggagagagagagaaagaatttctttcctccgccttttgattctatctgggggccccaaggcaatcggatcgtgcccgcccacatggagggcatatcttccctcctttatccagcaactcacacaccagtctcctctggaaacactcccactgatacacccagaagtaatgccttaccagctatctaggtatcacttaatccagtcaagttgacacgtaaaattaagcgtcacaggggccttcaactgtattgcttatttcagaaagatctgaggcaaatatgacaagtctagtgatactgctatgaagggggaaaaaggcagaggaaggagatggggaatcatggtggatgacatttaaaatctaggaagaatgattacaagaatccctcctggggaggggatatcagcgcagagacctaaatgaggggagggtagagatgcaaacatccaggggaccaatactccaagctgagggagcggcaggtacagacactaaggggtatcctgtttggctcatgactgcagtcccagcactttgggaggctggagcaggagaattgcttgagcccaagaattgaagaccagcctgggcaacatagcaagaccctgtctctacaattaaaaaaaaattagccaggcattgtggtacatgcctgtaatcccagctactcaagaaactgaggcaggaagatcatttcagctcaaggggttgaggctgcagtgagccaagatcacagcactgcactccagtgtgggtgacagagcaagaacctgtctcttaaaaaaaaaagtgtatatatatggaaaaaaatatatttatataaggagaatatatatatatttccatatatatatttatataaggagaatatgtatattctctaaaaatatatatgtttttccttatatctgaaaaaatatatatatatactccctaaaaaggaattccctgcattttaaaactgaaatatatataaatgttttatatacataacattacatttatatttttatatatatatatatatatatagtgttctgtttatgttgttgttgttgttgttttgagacagagtctcactctattgcccaggatggaatgcactggtgcgatctctgctcactacaacctctgcctcctgggttcaagcaattctcccgcctcagcctcctgagtagctgggattacaggcacatgccaccatgcccggctaatttttgtatttttaatagagatggggtttcaccttattggccaggctggtctcgaactcctgacctcaagtgatccacccaccttgacctcccagagtgctaggattacaggcgtgagccaccacacccagcgtaaagtgttctgttttaagtgaacaatccagcatatttagtatattaacaatgttgtacaaccacaatctctaattccaaaacatttcaatcactataaaatgaatcactctgtgcccataagcactttctccccatttcttcctctccccaacccctggaaaccaccaacctgcattctgtctgtatacatatacctttcgtgactatttgatataaatggaatcatacaatatgatctttgtgtctggcttctttgacttagcataatattttgaggtttatctatatacgttgtagcaaataccagcacttcattcctttttatggttgtgtgatactccatgtacatatatttgcagtcataatattaaaaaatttttaattgtggtaaaatcacataacaaaatttactatattaatcattttaagtgtacggttcagtggcattagtaatgtacattcatgttgtttacaaccatcaccaccatccacctccagaaccttattcttcactccaaactgaaactccatatccattattattgttattattattattattattttattattactattttttgagatggagttttgctcttattgcccaggctggagcgcaatggcacaatctcggctcaccgcaacctccacctcccgggttcaagcgattctcctgcctcagcctcccaagtagctgggattacaggcatgcaccaccatgtccagctaattttgcagttttagtagagacagggtttctccatgttggtcaggctggtctcgaactcccgacctcaggtgatctgcccgcctcggcctcccaaagtgctgggattacaggcgtgagccaccgcgcccggccccaaaactccatacccattaaacaataactcccaattgtcccctccctcagcccccggcaaccaccattctaatttctgtctgtatgaatttgactattccaggtacttcatataagtggaatcatacagtatttgcctttttgtgactggcttatttcatttagcataatgtcctcaaggctcatccgtgttgtattatgtgtcagaattttcttcctttttaaggataatatttcattccaaatgtatagaccacattttgtttatcattcatctgttgatgagcacttaggctgcttctacgtcttggctattgtgaataatgttgctatgaacatgggtgtaccaatatttgttcaggagtctgctttcaattctttttctttttttgagacagggtcttgctctgtcgcccaggctggagtggagagcagtggtgccatcacagttaatcgcagcctctacctcctgggctcaagtgatcctcccactttggcctcccacgtagctgggatcaccagtgcacacctcaatgctttgctaactttttaaaaatgtttttgtggagatggggttttgccatgttggccaggctggtctcaaactcctgggctcaaatgatctcctgcctaggtctcccaaagtgttgggattacaggcatgagccaccatgcctagcctgctttcaatccttttggtatatatccagaggtgggattgctggatcatataataattctacttttgattttttttgaagaatcattatgctgttttccataatggctgcattattttacattcctagcaacaatgtgaagtcttggtttgtgtgtgtgtgtgtctgtgttgttttttttgagatgatgtctcgttctgtcacccaggctggagtgcagtggcgccatcttgccttactgcaacctccacctcccgggttcaagtgattctccagcctctcagcctcccgagaagctgggatgacaggcacgtgccacaatacctggctgtttttgtatttttagtagagatggggtttcaccatgtttgccaggctggtcgcgaattcctgacttcaggtgatccactgcctcagcctcccaaagtgctgggattacaggtgtgagccactgcgcccagccaagtcttggtattttaatgttccccaattcagtgtgtgtggagagtactgggcagctctggagtggacattcacctgcatgttatctgatgggtctctctccttggttcaagagtgcaaggccaggtagtaagccagatgtggcttatgtaagtgattaattttatgtgtcaacttgactgggaacttagtgttgaatgtgatgcccagattaaacattatttctaggtgtgtctggaactcggtactaccaccttactccccaggtggtctgggagaggcagcaacagaaagtagacagtttattagggacccagcagatgctggaagcccagggaagggagtttcagggccctgcatccccctacctgtccccacaaatgcaccagctgctaagaccacacctcagcctccttcaccggacctctaaccccccaactatctcttcctgtggttggtcagtctatccacataggtgatgttatttgtccagctggcatctacaattcatcagtcagaaccttggtgatgacctgtccagagtggcaaggggtccaggcagatgagggtgtttccagatgagatgagcatttgaattggtaaactcagaaaagtactttgccctccccagtgtggatggacaccgtccaatttgttgagagcctaaacagaacaaaaggtaacaaaataaggaattcacctccccccactttttttgttgttgttgttgttcctgtctcactgcttgagcagggacatctcatttcttcttctcctgctctcagactgggatttatgccatcagctcccctggttcttaggcctttggaaatggatggaattatactactggctttcctggggctctagctggcagatggtagattacgagacttctcagccttcataactgcatgagccaattccttatcatctatctacctatctataagtccctttggttctgtttctctagaaaatcctaatataggacaggtgtagtggctcatgcctataatcctagcacattggaaggtcgaggcaggcagattacccgagctcaggagtttgagaccagcctgggcaacatggcaaaaccctatctctacaaaaaaaaaaaaaaatgcaaatattagccaggcatagtggcatgtacctgtggtcccagctactcaagagactgaggtgggaggatcacttgagcccaggaggttgaggctatagtgagtcatgatcacgccactgcattccagcctgggcaacagagccagaccctgtctcaaaaataaataaataaataagaaaatcctaatataccaggtgttcattataagtagctagggggttgggacaggaaaataaagaagttggtggtgcaggaagaggcttggagtcagggatcaaggggctatttgagggcttggactaggcttatgcctccaagaatggaaaagggatggaagcaagagacattaggatatggctaggatcaaaaaatcagatgataggccgggtgcaatggcttacgcctgtaatcctaacactttcggaggctgaggcgggcagatgatgaggtcaggagttggagaacagcctggccaacatggtgaaaccccgtctctactaaaaatacaaaaattagctgggcgtgattgcatgcgcctgtagtcacagttactcgggaggctgaggcaggagaattgcttgaacccgggaggcagacgttgtagtgagccgagatcacgccactgtactccagcctgggcaacagagtgagactctctctcaaaaaaaaaaaaaaaattagatgataacaaatagtgtaaaggatgtggagaaatcagttcccccacacattgttggcagaaatgtaaaatggtgctttggaaaatattctgacagttctgaaacaattaaatgtacagttactctatggcagggcatggtggctcacgcctgtaattccagcattttgggaggccaaggtgattggatcacctgaggtcaagagtttgagaccagtctggccaacgtggtaaaaccccgtctctactaaaaatacaaaaattagccaacatggtggtgcgcacctgtagtcccagttactcgggaggctgaagcaggaggatcgcttgaacctgggaggcagaggttgtggtgagctgagatctcgccactgcacccagcctgagtgacagagcgagactctgtctcaaaaaaaatatatatatatagatagatagatagatagatagatagatagatagatagatgatagatacgcagttactctgtgacccaacaattccactcctaggtgtatacccaaaagaaatgaggacacatgtctacccaaaaacttgtacataaatgtttacagtagcattatccatgatagccaaaaggtagaaagaacccaaatgtccatcaactgatgaatgaataatcaaaatgtggtatgtccataaatgaaatactattcaaccataaaaaggaatggagtactgataacatgctacaacacagacaaatcttgaaaacattatgctaagtgaaagaagccagtcacaaaatgccacatattatatgattctatttatacgaaatgtctagaacagggaggtctatagagacagaaagtagattttcagttgcttaaggctggagatggggtgacatggggatcttaagatgataccccaaatgttctaaaactgattgtggtgatgattgcatgtatctatgaatatactaaaaaccactgaaccatacactttattatttttattttttttgagatggagtttttgttcttgttgcccaggctggagtgcaatggcacaatctcagctcactgcaacctccgtcacctgggttcaagtgattctcttgcgctagcctcccgagtagctgggattacaggcatgtgccaccacacctggctaattttgtattttcagtagagacggggtttctccgtgttggtcaggctggtctcgaacttgtaaactcaggtgatccgcccacctcggcctcccaaagtgctgggattacaggcatgagccaccacactcagcctgaatcgtacactttaaatggtgaattgtgtggtgtgtgaattgtatctcaataaagctgttaaagggacagaagtctgggcacagtggctcgcgactgtaattccagcactttgggaggccgaggtgggcggatcacgagctcagttttttttgtttgtttgttttgagacggagtctccctctgtcgcccaggctggagtgcagtggcgcgatctctgctcactgcaagctccgcctcccgagttcacgccattctcctgcctcagcctccggagtgggattacaagcgaccgccaccacgcccggctaattttgtttttgtttttgtttttgtttttttggtatttttggtagagacggggtttcaccgtgttagccaggatgatctcggatctcctgacctcgtgatccgcccacctcgggcttccgaagtgctgggattacaggcgtgagccaccgcgcctggccacgaggtcaggatttcgagaccagcctggccaacacagtgaaaccccatctctactaaaaatacaaagattagccaggcatggtggcaggcgcctgtagtcccagctacttgggaggctgaggcaggagaatcgcttgaacccgggaggctgaggttgtggtgagccaagatcacgtcactgcactccagcctgggcaacagagcgagactccctctcaaaaaatagaaataaacgggacagaagccaggcgtggtggctcacgcctgtaatcccagcactttgggaggccgaggcgggtggatcacctgaggtcaggagttcgagaccagcctggccaaggtggtgaaacccccatctctactaaaaatacaaaaattagccaggcgtggttgtgggcacctttagtcccagctactcgggagtctgaggcaggagaattgctcaaacctgggaggctgaggcaggagaattgctcaaacccgggaggcagaggttgcagtgagctgagatcgcaccgcggcactccaacccggcgacagagggagactccgtctcaaaaaaaaaaaaaaaaaaaaaaacaaaatggacagaagatgtagcttagacttcatgagtgactagttatgggggctagagagaggaaggagacaaagagaacgtcaactattcagttcattatgacatggagaatgtgacggtaatcaccactgatagaaacaggacaatatgtggaaactgaaagaaataaaaatgcagtttggaggaagagatctaataaggttaaggaaaaatactagggccctgtaagttatttttgggttgattagaattttactagctttcccctacaaactccaagaaaatgtctttttcatatattttcatatctcatgggcctatattaagtcatgatcctggaccaaatgctgactccatctaggtatggcagagaagctaagcatccctcagtttccacactgtcctttttcctgttagcagagaaaccaatgctttcccccagttttcactgagaaaatggccacttcccagtttcctctgttggctggatatgtccatataactaagttcagcccaatgggatgggagggagagcgatgtgtgcaacttctagatcatcatcttaaagacaaaactttttgcagtgaatactctttttgctcttcctgaggactgaaacatgggctgagctagtctccatcacatgagcaggacagtgctttaggacaattggataaaagcgatccttattccttagtggcaggtggaagagaattgcttagctagccctggatatctgaccactagctgttttgtggtactcagaaatgaatttccattttatttaaaccactattttcaggtctctttgttaccatagttcggcctctaccgaaattaatacaccagtggggaatgggatgagcttgatgctagtgggccagggaaggtccctaaacgctggtgggaccacaaccctggctggtgtccaggctcttgacaccatcacaagaaggaattcaagaatgagtcagaaaatagtgaaagtgtggagatttattgcaaaatgaaaagtacacactcaagaaagtggagtgagggcgtactcaacagagagtcacgcaatggagtttggggtttctaaccttcatgggtttatttaaccgaggggtggaatattcatgaagattcctggaaaaaggtggagtttctcaaaactctggtgccactcatttttacaccaaatatgagtcctcctagaactgtcctggtgctggtaggtgtgtgattggtatgttaatgagtgtataatgaggtcctcagtgaaacctaggtcaaatccagtgccatgtttggtctggtaggtcttagccagctcagtccacatcctgtttttcagggttttatcagcccctcgcttctgtagctatttcatcagtttccttttgctagttatgtgaacctgcctcctggaattttctgttctcctgagaccaccctgtattaaggtgactgagtcaattcaatcagggtccacctctggggatggggccaggagaggggtcatcttccctgaagcacctgagttttatatggaacagtggacatctgaatgaaaactcaaggtgcttttccaaagaagaagggggaaaggatattgagcaatcaaaagcagaaaatgggccgggtgcagtgtctcacacctataatcccaacactttgggaggctgaggtgggcagatcacttgaggccaggagttcgagaccagcttggccaacatggccaaaccccgactctactaaaaacacaaaaattagccgggcatggtggtgcatgcctgttatctcagctacttgggaggctgaggcatgagaattgcttgaacctgggaggtggaggttgcagtgagccaagatcatgccactgcattatagtctgggcaaccgagtgagactcttttgcaaaagaaaaaaaaaaaagcagaaaaggttcactacaacctagaagagggtttctccacttaggcactactgtcatttggaactacataatattttgttgtaaggggctgtcttgtacattgtagaatgttggtagcatccctagtctctactgtatatactcccccccatcatgccaatcaaaaatatcttcagatcttgccaaatatcccctggagggcaaaaaatttcccatttgagaagcactgctctagaaagggcttggagctgccttttctgcctctcacttctagtctttttctcatatgattggcagattttcttttgtaacaaaaacatgccatgcttggaaataacaactgtattctgtgcactcatagagtcaaatctaaacccttaaatgagacttacaaaactcttctcaaaacaattacttgtctcacttctcaaaaaaattatttgtctcaactacaatcctatccccccatacagattgctctagtcatactgaatttttcccactattctcaaagtttccatgacttttttactcatatgcttttgtacatattcttctttctgcctgcagtacagacgctgctctacttgtgatgggggtaaatcttagtaagcgcattgtaagttgaaaatactggaagtcagccgggtacgggtggctcacgcctgtaatcccagcactttgggaggctgaggtgggcaaatcatgaggtcaggagattgagaccatcctggccaacatggtaataccccatctctactaaaaatgcaaaaattagctgggcgtggtggcgcatgcctgtaatcccagctactcaggaggctgaggcaggagaattgcttgaaccagggagtcagaggttgcggtgagctgagatcgtgctactgcattccagcctggcgacagagtgagactctgtctcaaaaaaaaaaaaaaaagaacgaaagaaaatactctaagtcaaaatgcatttactacacctaacctaccaaacattatagcctagtctaacctacctcaacgtgctcagaactcttacattagcctacagttggaaaaagtcatctaacacaaagcctattttatattaaagtgttgaatagttcatgtaatttattgactactgtactgaaagtggaaacagaacggttgtatgggtactcaaagtatgaattctactaaatttaaatcacttttgcaccactgtaaagtgaaaaaaaatcataagttggggaccatctgtacttttctccacttctctcttagggaaactcctatatactcttttttttttttttttgagacggagttttgctcttgttgcccaggctggagtgcaatggcacgatctcggctcaccacaacctccgcctcctgggttcaagcaattctcctgcctcagcctcccgagtagctgagattacaggcatgcaccactacgcctggctaattttgtatttttagtacagatggggtttctccatgttgaggctggtctcagactcctgacttcaggtgatctgcccgcctcagcctcccaaagtgctgggattacaggcgtgagccaccgcgcccagcctggaaacttctatatactctttaagactcaattcaaacaggacttcccctattaaaaaaaaaagtcctaacatttcctaagaaaacttggtgtctccatactaaactttgttcatacctatcgggtcatgcttggcacacttttttgttatttgtgtattaatcgcttttcagcccccgggggttctaacaaggtgcctaacacagagaagttgccccataaatgcttgttgaatgggtgagtgaaatgaaggaaaagtgccacagcagtgccttcaaatttcactgacaaaacttgtactttggccagagttcattggcttttattagcttagactgggtttacaacaggtgtctctgtcactaaactggaaagtaggtgaaaagctaacctcaggacaccaaattaaatactttcagcactgtgccatggtagcccttggatcacagagcatgaagtgtctgagcagtaatttccagctgctgctgccagagaaataataaatgatgttacacagaaagtatcacattatagtttattatacatgaacctctgtgagagtaagctgtaaatggttcgcaccctagagcatgggcttagtctttccaaacaaatccatttacttgttatctttataaagtcctgattaaaacatgttttggagatatagatatatctaacacatggaccatagtagtctcttgtgagtatctgaatcaaaattttagtatctagatagcaccaaacttagaaaagtatgcccttttacagaattacaggttcaatttcatttggctggactacatgtctttctactttagggtcctaatgtcagaatatggtcggacatggtagctcacacctgtaatcccaggactttgggaggccaagatgggaggattccttgaggccaggagtttgagaccaccctggacaacaaagtgagaccccatctctacagaaaataaaaaatttgccagggttggtgtatgtgcctgtagtcctagacgctcacaaggccaagatgggaggattgcttgaactcaggaagttgaggccgcagtgagccatgagtacatcactgcactccagcttgggtgacagagcaaaaccttgcctcaaaaaaaaaaaaaaaaaaaaaagaaatatatcagaataggcccactaccccctagaaaatgtccccaaacggcctctgctgcttcctactgctggctgtcttctcacatcactgacagaatcatctgtctattaacccagatatgtcatgcttggaactgtggagtctgtttaggacagcacaatcccgcagttgggtctgagaatagtaaaaatgtcacaaatgatccaccaactttggtggaatttttttttttttgagacagagtctcgctctgtcgcccaggctggagtgcagtggcgtgatctcggcttactgcaagctctgcctcccgggttctcaccattctcctgcctcagcctcccgagtagctgggactacaggcacacgccaccacgcccagctaattttttgtatttttagtagagacggggtttcaccatgttggccaggatggtctccatctcttgacctcgtgatccgcccaccttggcctcccaaagtgctgggattatagacgtgagccaccatgcccggctggtggagtttttttaacctaaaaattttacttctgtattaactttatagcacaaatattttcttcataatacggataatccagagggaagttcaaaagtgaaacagatggaggaagggcaggggaaaagatggtcccttgaattggggagagtagaaggtctcagggtccccatgtcatggcttccctgtgctggtccagtggatctcaactcggcggtctacacagcagcacacctggggaatttaaaaaatactgatgctccggccctgattgaaccagaatttcaggggacggcctatacagctactgcttaaatatccatccatgtatccagagtctgaaaaaaaccttcagattcataaacacagagcccatccccatgttggagaagcagagcacggtgatagcccccaccatgaataccaagaccggggagggactgggcttttccgccatctcctcactgtcccatacgctaccctcaacaaaaacacaggatagtgttaacagaagaaaggggaaggacactgggcaggtgcaaaaacatgacaaatatttattacagttagtataactgtgcctaaggcttaaagttccgtggtttgttttttttttgagacagagttttgcccttgttgcccaagctggagtacaatggcacgatctcagctcactgcaacctccacctcccgggttcaagcgattctcctgccttagcctcccgagtagctgggattacaggcgcatgccaccacacccggctaattttttgtattttttgtagaaacgggatttcaccatgttagccaagctgctcttgaactcctgacctcaggtgatctgcccacctcagcctcccaaagcactgggattacaggcatgagccgccgtgcccagtcaaggcttaaagttcatacaccaggcctgaacagcaattacttgctgcctaagtctttttttttttgagacagtcttgttctgtcgcccaagctagagtgccaatggcatgatctcagttcactgcaacctccacctcccagattcaggcgattctcctgcctcagcctcccaaggagctgggactacaggcatgtgccaccacacctggctactttttttatttttagtagagatggagtttcaccatgtttgtcaggctggtgttgaactcctgacctcaaatgatctgcccacctcggcctcccaaagtgctgggattacaggcatgagccattgtgtccagactttttttttttttttttttttttgagacagagtctccctttatcccccagtctggagtgcagtggcatgatctcggctcactgtagcttccgcctcccgtgtccaagcaattctcctgcctcagcctcccaagtagctgggattacaggcacatgccaccatgcccagctaatttttgtatttttagtagagatggggtttcaccatgttggccaggctggtcttgaacccctgacctcaggtgatctgcccgccttgccctcccaaagtgctgggattacaggcgtgagccactgcgcccagccgctgcctaagtcctattatagttcaggacctgggcaaagttgaacttgaacctataagtaaacaaggctagggaatgcaggatacaatacaggtagcagtaaaaggtgcgggcatgttttcttagctttgagtgaaggggaaaaaaattgagagggaaattcccccccccttttttttctgttaatgttgatatcttataatgttggacactttaaagtaaatacttataatcctcacccccacagaaaagtttcacttgtgttatataacatatacccaatagaattgagatatgattcataacctatatgtgtgactctgtttcttaatcataaaatgtgtggtatctgtcaatgttagaagatggagcagggactcctcttagggacctgccaggtgcccccacccccaccaccacaagcacgaaaataaaggacaagttttgagttccttcacaggagattccaggcacctagctagacttgagaagtaaatgagcaatccaagaagagagcagtaggtggggcgtggtgctcacgcctgtaatcccagcactttgggaggccgaggcgggtggatcacgaagtcaggagatcgagaccatcctggctaacacggtgaaaccccgtctctactaaaaatacaaaaaattagccaggcgtggtggcgggcgcctgtaatcccagctactcaggaggctgaggcaggagaatggcgtgaacctgggaggcggagctggcagtgagccgagatcaccccactgcactccagcctgggcgacagaatgagactctgtctcaaaaaaaaaaaaaaaagagagagcagtaacttaaaaaataagtcttctaagcaagttagagtcacaagctatttcagttgcctgtagaaactaaaagacaacatcttaatgtatgttcttgagttgttttttgtttgtttgtttgtttttgagatggagtctggctctgtcaccaggctggagtgcagtggcgtgatctcggctcattgcaacctctgcctcccgggttcaagccattctcctgcctcagcctcccaagtggctgggactacaggcacatgccaccacgcccgggtaatttttatatttttagtagagacagggaatcaccatgttggccaggatggtctcgatttcttgacctcatgatccgcccgccttggcctcccaaagtgctgggattacaggggtgagccaccgtgcctgttctttgagttgtttatcagaaagctggacccccaccagatgaaaaatgctgatcactgtcacatagacctcagataagggagaagtaaggactgaactctgactgttctgaatttctccctgagcagcctggagggagtcaggcccacaggccaaaccttaacattcctttccgatgacccccagtttttagacaaagccttgctccttaaccaactccaaatcaaagagtctctgaatccaattatgacctgtaagctcctgctttgagacatcccactttttggtggccaaatcaatgtataacctccatatattgatttactattttgcctgtaacttttgtttcctttttttgagacagagtctctctctgtcgcccaggctgcagtgcggtggtgcgatctcggctcactgcaactctgcctcccgggctcacgccattctcctgccttagcctcccaagtagctgggactacaggcacctgccaccatgcccggctaatttttttgtatttttggtagagacggagtttcaccgcattagccaggatggtcttgattttctgaccttgtgatccgcccacctcggcctccgaaagtgctggaattacaggcctgatccaccatgcccagcctctttttttttttttcccatttaaaaaatatttttggtcaggcacggtggctcatgcctataatcccagcactttgggaggctgaggtgggcagatcacctgaggtcaggagttcaaaaccagcctggccaacatggcaaaatcctgtctctactaaaaatacaaaaattagctgggcacggtggcacacacctgtattcacaactacttgggaagctgaggcaggagaatcacttgaacctgggaggcggaagctgcagtgagctgagatcatgccactgaaccccagtctgggcaacagaatatgactccgtctcaaaaaaaaaatatatatatatatatatatatattatatatatgtgtgtgtgtgtgtgtgtgtgtgtgtgtgtgtttgtgtgtgtatttatttatttatttttataaaaaatagagacagggtctcactatgtttcccaggctgatcttgaactgggctcaagctatcctcctgcttccgcttcccaaagtgctgggattacaggtgtgaaccacctggccaacttctgctttcttaaacatccttacctgtaagtcattagggagttcaagtcttcagcattagtttgctgcccagttctccttgcctggcaccaggcaataaatgcctcacttccgcttgctgtaaatcccagcgtcagtgtttgtttgtttgtttttcctgtgtgctgcgtaagcagacccaagttcagttgggtaacagctaggattctaaaggttaagggaagcaagtgaactttgttttggctttttcccactacaccagagataaaccagtacagggagtaaagtcccatttttacaggctgtatatgagaggacctgtgtgcagtgcagagcagctgctgctccgggtagaaaagtcttgcctaaagatcaaacaatcagtatgtcactatgagttctccttgacccaagagctcttgcaggcctggagggaacatctgtcccagagtggtctttatggagaatttctagggttggtccattagggaaaatgtccccaaggaacattgattcttacctatataagaatacatacacccaggccgggcgtggtggctcacgcctgtaatcccagcactttgggaggccaaggcgggcggatcacgaggtcaggagatcgagaccatcctggctaacacggtgaaagcctgtctctactaaaaatacaaaaaattagctgggcatggtggcgagcacctatagtcccagctacttgggaggctgaggcaggagaatggcgtgaacctgggaggcggagcttgcagtgagccgagactgcgccactgcactccagcctgggtgacagagtgagactctgtctcaaaaaaaaaaaaaaaaaagaatatatacacctcactccccatttttgtgagacctgagaaagcagtaaggacagtaatgacgatgaatagtgacttctttttatttctactatgcaggctctgtgctggatattttgcctgccatgatttatttaatcctgaacacaaccccgtgaggtagaaattagcaccagctcacttgggtgaactgagtctgtctgacctgcgtctttcagccatgtctctgaaacctactttttctgcagcaccccccaccctgaactagggtactgtaggctctaatttcttaatcgcctcagatcatccacaagttctgacacctgagattggagcccgtggtcttgcagacagatccccccggtaaccaagggctttctctttagccttcttccaatcacctgccaattgccttcccaatcctgcttggactgactctcagatgctacagtgacactgcttcagaggagtgacatatatatacatataattatatataaaataatatataaaaatagtatatataaacaagaaatatataaaaatatatatttcatttacttatttattttttgagatgaagtctcgctctgtcacccaggctggagtgcaatggtgcaatctcagctcactgcaacctccgccttctggattcaagtgattctcctgcctcagcctctcgagtagctgggactacagccatgcgccaccacgcccagctaatttttgtagttttagtagagacggggtttcaccatgttggccaggatggtctcgatctcttgacctcatgatctgcccaccttgtcctcccaaagtgctgggattataggcgtgagccagtgtgcccggcctatttcttttatttttatttttatttatttttattttttttagacagggtgttgctctgtcaccaaggctggagtgcagtgatgcaaacatgctcactgcagcctcaacctcctgggctcaaatgagcctcccaccttggcctcttgtgcagctgggactataggtgcgtgccaccatgcccagcaaattttcatatttttaattttatgtagaaacagagtctcactttgttgcccagctggtctcaaactcctggattcaagccatcctcccaccttggcctcccaaagtgctgagattcaggcatgagccactgcacctggcctcacaggcttatctcttggccttatcattttctccaaggtgaatgccaaagaaaattgactttgctatgcatttgagtcagtggcctctgcctgttcctgttggtatgcctgatttctggcctatcctggttgaagcttgggctctgtgattatgaaagagaagacttttcagacaccagacatatgattggatattaaaatagtggctagacaggattttatacctgtaagtgctatagcaaatgctccttctctcctgtcctcacacacaaaaaaagataaattatggatccttatcctttggaaggctggaagcttatgtgttaaaagtgtaaatgttagctgcgtgcaatggctcactgtaatcccagcatttaaaggccgaggtgggcgatagctttgagttcaggactttgagaccaacctgggcaacatggcaaaaccctgtctctacaaaaaatacaaaaattagctgggcgtgttggctacttggcccctatagtcccagctacttggaaggctcaggtgggaggtttgagcctgggaagcggagactgtagtgagatcgcgccactgcactccagcctgggtgacagagtgagagcttgtttcaaaaaaaaaaaaaatacacacacacacacacacacacacacacacacacacacacacacatatatatttggtgttataaatatttttaaagtaacttttatgttttttcgttttgtttttttgagacagagtcttgctcagtcgcccaggctggagtgcagtggcgcgatcttggctcactgcaagctccgcctcctgggttcacaccattctcctacctcagcctcccaagtagctgggactacaggcgtccgccaccacgcccagctaattttttgtgtatttttagtaaagatggggtttcaccgtgttagccaggatgatctcggtctcctgacctcgtgatccacccacctcggcctcccaaagtgctgggattacaggcgtgagccaccgcgcccggcctatgtttttctaattataaaaatatgtgagttttctgtagacagcatgtaaatacagaaaaatatcacccagagtccaataatccctaaatggagaatcactgggaacagtttagtgtatatagtatgtttaagctgtacatacacataaacacaaaattgtgagcattctcagtatggtttcatgtactgctatttcatttactattaccctgctagcatttcccctatcatcaaaattctttgaaaatatgtttattaactgtataatattttattttatgaatgtactgtgaattatttaatcctcttcagagactcaggttgattctactgataattgtgctgcaacgagcatactgtgcgttcatttctatgtggaattctatggccttaaaatagaatcctagcagtagaatcactgagataaagggtaagagtatctaaagcagtggctaatgaagttttagttttaggaccctttacattcttatgtgttttttcttttttttctttttttttgagactgagtcttgtttttttttcttttcttttttttgagactgaatcttgctctattgcccaggctggagtgcaatgacacgatctcagctcactgcaatctccaccttccgggttcacgccattcttgcgcctcagcctcccaagtagctgagattacaggtgcccgccaccatggcgggctaattttcatatttttagtagagacagggttttgccattcttggccaggctggtctcaggtgatctgaccacctcggcctctcaaagtgctgcccggccctttttcattctcaactattgttgaagacctaaagagattttgtttatgttggttacagctatcagtattcactatattagaaatttaaaataagaaattaaaaaaatatttattacttcatgttaaaatagcaataaggaacccattatttttgaataaacagaggaattaacgagaggttgaagtcaagtatgctagtttcctgcagaggcccaaagaaattcccgtttctggtgattccattcacagagactgaaaacagaggagcaggggagtgggcaggggtgggccttggtggagacagagatgggaaagagggtgagtctgtaagagtctggcattcctcctacaggacacgtgggcattttcaagactccagtccactaggtggatcttcaaaggcttatgccacattcttccatagcacacttctaaaatacctgttttatagggtttaaactatctgctttatagggaccaagtgtggtggctcacgcccgtaatcccagcactttgggaggccgaggcagatggatcacaaggtcaggtgttcgagaccagcctggccaagatggcaaaaccccgtctctactaaaaatacaaaaattagccggggccagatgcagtggctaacgcctgtaatctcagcactttgggaggccaaggcaggcggatcgcttgaggccagtagttcaagaccagcctggccaacacagtgaaacccagtctctactaaaaatacaaaaataagccaggcgtggtggcgtgaacctgtaattctagctactcgggatcctgaagcacgagaatcgctagaatccaggaggcagaggttgcagtgagccaagattgcaccactgcactccagcctgggcgacagagcaagactctatttcaaaaaaaaaaaaaatctgctttatagggtccttttacaaactattaggccacttatcctcaaaaccaaacaatgcaatagggtagacagataggaactcgcaggctgttcacaaggaaactgaggccctgagaggttatgtgacttgtcagtcttcccacctcccttttgcccatcttataatagactcatgtctggaactcaattgtcctgattgctagctcgttgtgcccagtgactcaagagagtgaaaattgttggttcagcagtctatcttctaaatttgcttcttctaaaagtatttaaaaggtataagaaatataaattactccctaggctgctaggcaggcacctggttttctcctggggtagtcagaaccctcctatctttaatttttcacggatgaatataccaacagtgaacaatggccagaccatggggaatagaactgagtctcacaaactttgtagcaaccagctggggaagccaaaccacttggcttccaactcagcaccgaccagagaaagccaaagatgctccccagactaatcaccgaagatgccctgcttcattttttttttttttttttttttgagacagagtttcgctttgtcacccaggctggagtgcagtggtgcgatcttggctcactgcaacctctgcctcccagattaaagcaattctcctgcctcagcctccctagcagctgggactacaggcacgcaccaccatgcccggcttatttatttatttatttatatttttagcagagacgaggtttccctatgttggccaggctggccttgaactcctgaccttgtgagcttcccacctcagcctcccaaattgctgggattacaggcgtgagccaccgcacccagcctgccctgcttctaagcagtccatctcccacttcctcgtgccaataagctccaatccagataaacctgaagccttccctttttgtcactgtaaattctctcactcctctgcctgctttgaccttctgccaaagtgatggaagctgactcccatagcatagcaagctctgagtaaatagcccctgtactcatttatttccacaccactgaatgaataatgaaagatgttataaagccaaattatgaaaagggcatcagttattaaacatttgtaaaatgttttacaaccatcttagtatgcctcataaacacctcgtgaagtgctgccatccccgtttcagagctgagaaaattgagaaggaaccatgagattaagtgacttgcccagagctatgatgagaacatgagccccccagggtttgaggtctgttgtttatccactgagcttgagctgcgctttggaatcattaccatcttaaagcattttaccctgtgttgggtgaatattaagaagtagatcacatttcagcctggcaggcgcgaaagtattgtttttagtttgtttttctaaattttagtagaggacatatgggctctattaactttactatgtagcacaatttgaaagatagtttcttttccagcaaatttttcaccgtaatttaacattttaaaattcagcacacaccgtcctccctggatacttgtttttctcagagttgggcctttttcctctccactgcagcttggaaggtcgtaaatccagccagggggattttattatgcctggggacagttttcaaagttaggtatgagtggaaggaagggagggcgggtgcaacagcgctggacaaagtccgtctaatgcaagactttcctttcttttttttttgtttttaaagataagaacttttttggctttctccccgcaaagcttgctgatgatgttgactgatgaggacatgaaaaaagctgagatttgcagaacataactggagcataagaacgcctgtctggaaggcaggggctgctgggaaaggatctctctggagctccttgctggctgcaaaaatgcagctgtccctattcctctctactctgggacatttaaaaaggaggctgtgtggcagtagcatttggcttgtgtgccactgtacctggtcagcctggcatggaatgccttagtggtttgttaggggtcactgactgaggctaaataaatttagcaccatgtatactttcattaaatattaaacaatgaggccaagcacggtggctcatgcctgtaatcccagcactttgggaggctgaggtgggaggatcgcttgtggccaggagtttgagaccagcctgggcgacatagcgaaaccctgtctctacaaaaaatttaaaaaattaactaggcatggtgatgcatacctgtagtcccagctacttgggaggctgaggcaggaggatcacttgaacccaggaggtcacggcagcattgagctctgatcatagcactgcctctggcctgggcaacagagcaatactctgtctctaaaagagaaaaacaaacaaacaacaacaaaaaaaaacacaaaaagacaataacattcaattgtttgctaatggttcatctgcccaatctctggaatcctgtctttcacctactcaccttcactcacttagaaacttatgcattggcttcaaatactatttcttctatattatcctttcacctttcttctttaaaaaaaaatttatttagagacagggtcttgctaggttgctcgggctggccttgaactcctggccttaagtgatcctcccacctctgccttccatctttttatcttcttcagcttatgaaaatggatccatctgcattaaaggcctaaaaatgtatgtagtcaggtgagtgttgtgatagttggtgtgatggttaatactgagtgtcaacttgattggattgagggatacaaagtatgaatcctgggtgtgtctgcgtggctattgccaaaagagattaatattggagtcagtgggctggggaaggcagatccacccttcatctggtgggcacaatgtaatcagctgccagtgaatataaggcaggcagaaaaacacgaaaaggagagagactggcctagcctcccagcctacatctttctcccatgctggatgcttcctgccctcaaacgtcggactccaggttcttcagttttgggacttggactggatctccttgctcctcagcttgcagacagcctattgtgggaccttgtgattgtggaggttaatacttaataaactccccttatgtctgtctgtctatctgtctgtctgtctatctatctatctatctatctatctatcataggatatatatatatatctatttatattagttctgtccctctaagagaaccctgactaacacagttggtgaaggtttccttttctcctctgatgatgtgagtgaagcaggctttcagggattatgagaacaggcgaagtcttcaaggagatgggcccctcaaacacagcctgcacatcccatccatctccccattctcctggaagccatgccttggaaggcagaggggatgctggagggatgcaggtctcagggcctgagaagttgagggtggttctagatagagtagagaatgaatgggataaggggcagtagaggcctgacctccgagagatctcaccactcctaactttgactattcctgtctggctgcatttgggtttccttttgtcccaagaaaagaaagacgaaaaaccttagagtgttgggagtctagatatgttaaaactaacagatgttagttcattgatcaccaagacaatgcacgggccagtaggacttctcacagcaaaaaagccaggatggagaggcggaagaccaggttgggcagatccttcagctttcagctgtttttctcatcctttatagcactgtaattaggactagatgaggaaaaaaagatgggcatgagctgtagctacagggggaaaacaataaatgactaacagataaaaaaaatgtaagtgaagtgctaatattccagtcatttaaaatattgctgggaagaccaattatccgtgtaaaaaaggtgaaaacaaatataacattgcttaggtaattctgtggacccttgatacacagtatttgcataaaatcagaattacagaatttagtgttttgtggtttttgtttgtttgttttttgagacacctgggtccggggaggtggaggctgcagtgagctgtcatgccactgcactccagcctgcacaacagagtgatgaaagaaaggaagggagggagggagggagggagggggaggggaggggaggggaaggggaagggagaagggagggggaggggaggagagggggaggggaggggagggggaggggaggaggggggggaggggggaggggaggagagggggaggggaggggggagggaggggagggagaaagaaaggaagggagggaggaggaggggagggggaggggagggggaggggaggggagggggaggggagggggaggggaagggagggggatgggaggggagaggagggggaggggagcgggatgggaggggaggggggagggaggggagggaagggagaaaggaaggaaggaaggaagggagagaaagcaagggaaagaaggaaagaaagaaagggaaaataatcaaaaatataagaacacaaacaaaagcacattctgtcagctcatcctctctataggctaaggaaactatactatctgaacccaaaggagagaaataaacaaaatcaaatacttatctacccatccctctgcacacggtcttagttgaagtgagagtatacacttcattactgtgtacctggattttatcccattctgctacaaaatgcacgtcagtgcgttcactttcactgcatgatatagaagctgttctgtatgcagccaaatcacattactgcccattgctgaaagaaatgaccttcaatgaacgggttataaaattcactcatgatcacttattgaatgcctatgtgccagacacactgttaagcatgatggaatcagagaaatgttgctgtctaacgtatcccagtctagtggggtaatatataacctgatacattatgattccatggaagtgtttcactaatggtataaatcacgagctgtgtcagaaacccaggaggaattgatacgtctcccgggagagtgtggggagactctggtggaggtgacgtgtgatcgtggtcttgaaggatgagcggaaatttgccaagtgaacaagggggaaaggaatttacaagtagagggaagaggatggctcgtcaaagtgtctggcaatactgagaaatgttgaaaagggtggtgtagctacagcccaggtttcacgggacagaggtagctgcagtgtggttaggttggggctagtgcatggggagccttggtacacctgccacgtgcaactggtaatcatccctagaggtactgggagcacagagtgtcatgcgtggagttacatgtactgtgtgctgtgcttttaatgtaacttgaagtcgtaaggagggaatatatgatgtgggagcagagcaaggagaagcaagttagggagaccaaacaggaggcagcagtggggacggctgactttgagaggcgtctttgaaagacaataggtaatatttggtagacattggatgtggaggctgaggcagcaggagaaacagagtatgactttgaagttgctcaatacaggagatactgggtggctggcggtactattaacccagatgacaggacacggaaacaggatgggttctctgctccggcgtgtccctgaggagtcactcttaactttggtacaggtgatcagcaactgggaaagtgtatgaagcccactccagaatgagaccactgacctcttcatttccatgctttcggctcaaggtatcattcggctcaacaccatttaaaagctatctaggctgggtgtagtggctcacacctgtaatcccagcactttgggaggccgaggcgggtggatcacttgaggtcaggagttcaagaccagcctggccaacatggtgaaaccccatctctacaaaaaaattaaaaaattagctgggtgtggtggtgggtgcctgtaatcccagctacttgggagtctgaggcaggagaattgcttgaacccgggaggcagaggttgcagtgagctgagatcgtgccactgcactccagcctgggtgacagagcaagatgccgtctaaaaaccaaaataaaaagctatctaggggcaggcttatgcctgtaatctcgacactttgggaggctgaggcgggcagatcacctgaggtctggagttcaagaccagcctggccaacatggtgaaaccccatctcctttactaaaaatacaaaattagctggccatggtagtgcacacccataatcccagctactcaggaggctgaggcaggagaatcgcttgaacccaggagcagaggttgcaatgagccaagatcatgccattgcactccagcctgggcgacaagagaaaactctgtctctaaataaataaataaaaataaaagctatttagggccaggcatggtggctcatgcctgtaatcccagcacttcagaaggctgaaatgggcagattgcttgagtccaggggtttgagaccagcctggccaacatggcaaaaccctgtatctacaaaaatacaaaaattagctgggcgtggtggcacatgcctgtagtcccagctacttggggggctgaggcaggaggattacttgagcccgagagttggaggctgcagtaagctgtgtttgcgccactacactccagcctgggtgacaaagcaaaattgtctcaaacaacaacaacaaaaacaacaacaaaaagctttctagaacatttccaatctagtgcaaacctctttttggttacaccgtgtatcattccagttataagaatgtaaaaagtggcaactccggagccaggctatctgggcaagtgacctctggaaaggcccttaaacttcgctgtgtctcagtttccttatctacagaataaggattaaaattattcaaaaggttgttgtggaattgaaatgagttagtatatgtaaaagtgaatctggcgcatagtgtaagtactttcttttgtggagtcttgctctgtcgctcaggctggagtgcaggggtgcaatcttggctcactacaaactctgcccccgccacgcccagctaatttttgtatttttagtagagatggggtttcgtcatgttggccaggctggtttcgaactcctgacctcaggtgatccacccgcctcggcctcccaaagtgctgggattacaggcgtgagccactgtgcccggcccatagtgtaagtactttctaagtgtttgctatcaataagtaataaatcatagaatactcgactgaaagtggtacaaatattagagatttattattacagaacaagatggaagttggcagttccagggtttgtcctgtcaattaaccaaggcatcccggagactggactcttcctgtacccactgccacgctcagtgtggcagtgccttctcccctcatcatggcagggaggccaccacagctccaacaaccaagtcttcacatggtcagcatcccaagcatgaaataaggggatgtggttagaaagggcttttctccttgtgcagccttccctttacaagcaagaaaatctctcctagaagtccctagtaggtttcctttcagctaaaacttgggtcacaggcccatccctgaacctggcacttccaacctgtaacaaatgaggcagaagtgggactagggctggctgctgggcagctgaccggtagtgcccaccacagtctgggagccaaagagttccaaaagttcctcactcaggccaggggtaattgagaaacaggcacataacagtattcatccaggagtcctcaggttttttaagagttttttagttttttttttgttgttgttgttttgtttttttttttgagatgggctctcgttctgtcgcccaggctggagtgcagtggcgtgatcatggctcactgcagcctcgacctcctgggctcaagtgatcctcccacctcagtctcccaaagggctgagattacagatgtgagccactatgtgcctggctaagagtagcttatttttattttattttattttatttttttgagatagagtcttgctctgtcgcctaggctggagtgcaatggagcgatcttggctcactgcaaccgccccctcccggcctcaagcaattatcctacctcagcctcccaagtagctgggattacaggtgtctgccaccatgcctggctaatttttgtatttctgtagagatggggtttcaccatgttggccaggctggtctagaactcctgacctcaggtgatccacccaccttggactcccaaagtgctgggattacaggcgtgagccaccacgcctggccaagagtagctttttaacctaggtcagtatcgtgttggtaaaatacggagagaggatgtttgagcagaaggacctacctcatcttctcacctgttctaggctgctaccttctctttctacaaaccaaaggagggggctcataactcaatgggccttgtgggaaaggctaaccagactagtcactgctgaattcctctaagggattcccctaccctgactgcccttgccacagttgcacccaccatcctaggggcagtaagtagagagagctgtgtgagaagagcactctttccactccagatgtcccctacaacctatatcctcacggccactaacagtttgggcccgtagcatcactcatctggaccgctcccatgtggtctccccatcacaacaaagactgcagcaaggtggacagagaactccaagagagccaggaaaatacctttataaaccatcacagaaagcctgatttccactcgctaaatccattaataaagagaggagaaattttaaaattccaaggcacctggttactaatctgattctggcctacatgtggatattcaataaatacttgttaagttaaattgactcaaggttttatttattcagcctacttaaagcttatgtaaaccccttggagatttgtgtcaagctgttaagttggaaaatataagaaaagtagtattttcaatagaccagctttcctcttaatgtactttatgaacttagtgtaaaccagggaaatgggggaggggtaccagaagagcagaggggaaggaggtgaggaggaaggaagaggtgaggaggaaggagaagaaaagccttttctgtcatttcctgcatttgtcttaattgctgtacttattaaccagctactgccctctagtgctcactgtattaagttcgcatctgaattccatttttatctttaaaaactctggtgacacttggaagggatcaaatttcctgttttgcagataagcaaattgaagtccagaggaaagaggtatcaaactgacccaggggacttctggactctttgttacctcacctataacttgtctggaaaactttattaaaagcctttctcagaaattttaattggtaaccagtaaaaattgtagcatcatgttagtgctagttattattattattatttttgagacggagtctggctctgttgcccaggctggagcgcaatggtgcaatctggctcaccgcaacctccgcctcctggattcaaactactctcctgcctcagcctcccaagtagctggaactacaggcgcccgccaccacgcccggctaattttttgtatttttagtagaggcggggtttcaccgtgttagccaggatggtctcgatctcctgacctcgtgatttgcccatctcggcctcccaaagtgctgggattacaggcgtgagccaccgcgcctggcctgtgctagttattatttccaatgttgttctaaattaagcttagactgattgctggtcaatttaagtaaggatataaaataatagtggtacatttttaacttagtacaagtttagaaaatgtctataatacttctttaaaaagttaactagaggccgggcacggtggctcacgcctgtaatcccagcactttgggaggccgaggcgggcggatcacaaggtcaggagatcgagaccatcctgactaacacagtgaaaccccgtctttactaaaaatataaaaaattagctgggcgtgttggcgggcgcctgtagtcccagctacttgggaggctgaggcaggagaatggcgggaacccaggaggcggagctggcagtgagccgagatcgcgccactgcactctagcctgggtgacagagcaagactctgtcacacacacacacacacacacacacacacacacacacacacaagttaactagaacagatcccaagtggatatggccatttatcagaactgacttatcattgtctccatgtgggctaacattccgctagattctcccaagtgaagctctttgctcactgatgggaaaaagggggggttgtcattttaacgtggaacgcatattttcaccacataatcattttgctagtggaaataaatggaaagttatccagctggacatgctacttatgagaacactactgagtaacaaaagatttattcaaatatttaattggaaggaactacatctggaataagttttaaaggaatccatataaaaagaaaagcaaatccattagaaattgatataaacagttgattttatctggaaccaagaatgtgaatgaattggaacctagatgtcctaacctgtttctttgcataaaagccagttgaattttgaaatttatatggcaattatactttattactttacatagagctttgtttttagctaatattttagagacagattacccaaaattacctaatttggttcccacttcattccttctcaaaaaccaaacataaaacagaagggggccagctgtggtggctcatgcctgtaatcccagcactttgggaggccgaggagggtggatcactaggtcaggagtttgagaccagcctgaccaacatggtgaaaccccgtctctactaaaaatacaaaaatcacccaggtgtggtggcacatgcctgtaatcccagatacttaggaggctgaggcaggagaatcgcttgaacccaggagacggaggttgcggtgagagccgagatcgtgctactgcactccagcctgggcaacaaagcaagactctgtctccaaaaaaaaaaaaggaaagcagaagggggcattttcctgtcttcaaaatacaacctcctgctaagactagcaagtcagcagaaactcattgcatttgggcttctggttactaaatgaattaagagacaccgagttccatccttagatgtccacatagatcccattgatcaaataatccagtcttgagtaacgtttcctgcggagtgattccgagaggattctacccaggaggacgaggcctatcaccaggaacaggacaccaaagagcagggacccgataagaagccatttttcaaatggaaggccgtactgattttctggaacactgccctgggaggaactgcctggactggcctccctaccttcccaggaagcagttttattcatagtggaagactccacatttgacatagaaagtgcagtagggttatacacattccctgtgttcaaagttaggttggagatttctgtaaacggtatggtttctaagctgcctttcgagtccgtaggtgcctgaaaggtggtagtcagaactgctgttgtagccattgcttggagtgtagccgcagcccgtgtaaaaactgtagaaatgagggtcgtgggaggctgagaagtgacagtggttacaggtggagctgtggtggccagctgtggctgggaagtcccagaaggtgtcactgaagcattggtgggtagaagggtggcgggctttggagtagccgaggtggtatgtggagaagcaactgccaccgtagctgggagcgcactcacattttcaggcagcagatgagctatttcttgatcagaggaaaattgtgaactctgagaatggcctttttccttataagcaaggagctgggcacttgcttcatccatcttaaatagtttctccaagtgatctgaggatccaaacttctgagaaagtgtgtctctccatgagatatcggtgggctttgaataatctgtgtgatgatgggctaggggagtgactgcttgtgaaaattggccatgtaagagagaatcttcctggggtaactcttggcttggcaaatttctggtcaaagatggaaaatctgaaaatgtatggaaaataaaaggaaggcttatgtaactccatgctacggtaggttaaaaaaatacaaacatatcagcttgttcaaaagatccctaaactggttggccatggtggctcacgcctataatcccagcactttgggaggctaaggcaggaggatggtttgaggccaggagttggagaccagcctggacaacatagggagatcctgtctcttaaacaaaaaaatctccaaactgttgatacttgacatttcattgaaatgtgtgcaaaatggaaaaacacaaattgctaaatgagaatctgataacgccgcctctctaccagatgctgtggtttatttctagcatgataggacagaagagaagagaaatgtgtggaggaggaccaggcaaattaaggaaaaggtgggaggtgcacagcagagaagccggaggggctcagcagggcagcaagaggcttacaaagatggaaagggttctccgtcttcctaaggggccaaggccagggaaaaaagtgggccggagggtgacctgagcaggaaaggttggcagggagaatgcgggggaaggtgtgggcttctgcaagacatgccacctaagactgagatgacaaatggggagcaagtaatcatcaggagagatttcagtgggggcatgaggcaggcaagaaaggtatgtggaagctgtgggaaatgaggcaatagagcaggagagagggagcagaatccctgtggtgtgtctctgacagggaggaggaggaggggccaggcagggtctggtctccgctctgagcactgaggccacagcagcagcagaacagcaacaacgacaacaaaaaaccagagatatatcgttccagcactgtgcgcagaggagggaggctatctgggagatttcatttggactctcaaagattagaattttggagccaatgtcataggtcatgaggatgatgggaccaatatttgaaatcatgatgaccacactgtagacacagagggcagaaaaaccatacagtcccgatgcctgctgaggagaaaccagccccagatcctgctcctgctccatgaagcttagaatttttctcctgatcacacaccccatttatcacagctcaaactggaaagacctgttcaagcaatcaagtgcagggaatgaccaggtgaattgccatgtatcactctgctgctaggctaaccatctcacattagaactgcagaaaacacaaggaaagaagcagaggaatgtcctggcatttctcagtccactcactcctgctctcttttcctttttcttcctcaattcacctccatgccagtttccaaactggtcctcagtctcctctttcctacagacggatccagaggcagctacggattcatgccatctcgtgactactctctaagccttacccctctgagaggttctttgcactgtcactctgtcacttattcgtccatctaggacagggctcagcaaactacggcctgatggacaaatctggcctgccatctgtctttgtatgacttgcaagctaagaatggtttttacgttttttaaaatttttatttgttttgagacagagtctcactctgtcgcccaggctggagtgcagtggtatgatctcgactcactgcaacctctgccttccagattcaggcgattctcctacctctgcctcctgagtagctgggattacaggcgcgtgccaccacacctgggtgattgttctatttttagtagaggtgaggtttcaccatgttggccaagctggtttcaaactcctgacctcaggtgatccacccccttcggtctcccaaagtgctgggattatagaggtgagccaccatgcctggccagtttttatatttcttttaatggctgaaaaataatcaaaagaaaattgtgtgacacaggaaaggtatacaaaattcaaatttctgtatttcaaaacctaaagtactggtgtgaaaagcctaaaatactatttggcccttggcagaaaaagttggtggacatctgctctaggatatagtattctactctaaagtagaatttgggtcaaatgaaatatatttgaaaatatatatatatatatttttgagacagggtcttgctctgtcacccaggctggagtgcagtggcacaaacacagctcactgcagcctcaacctcctgggttcaagcaatcctcccacctcagcctcttgagcagctggggccacaatgccatgccaccatgcccagctaatttttgtattttttgtagagacagaattttgccatgttgcccaggctggtcttgaactcctggaatcaagcaatccgcccacctcagcctcccaaagtgctggaattacaggtgtgagccatcatacttggcctataattcattttaaagttaaaaaagaaaaagactgtttaagtaaacactctgtgatgtgtgtgaaatcagaacttaaatatggccattgacaagaatggccaaaacagctgttttctttctcaagcatgcaagctcataaataaagcaaagctagggccagtcccacttcttgataagattcctctgttggcagaggtcctagaaccacaaagggatcctccacacctgctccattcgcctcacccactcatgtttgccattggggcatggtgcttcctctcagtcacgcagagatgagccacaaagggagctgcaaagcagctcagcgcccttaactcctctttggagttttattttcaaacgacttcactgagttgaaaaatgagagactgactattactgggaccccagctgagcaaacagactcccaatttattctatgtctgaattctcctattcttccagtccttggtaaaaatgacatgccatgaagctgccaacaacaacaataaaagattaaataccaaactgcaatggctttagagaatgaacagaatccactgtcatctttcaaactcttggtccgtaaatattagtcaatgggatataggaaatagaggctgggcacggtggctcatgcctgtaatcccagcactttgagaggccgaggcaggatgattgcttgaggccaggagtttgagaccagcctgggcaacatactgagacccccccattgctacaaaacattttaaaaaattagcctggcatggtggtgcattatctgtagtcccaaatacttgggaggctgaatggagaggactgcttgagctcaggaggtggaggctgcagtgagccatgatcgcgccgctgcagtgagccatgatcgcgccactgcactgcagcctgggcaacagagtgagatgctgccttaaaaaaaaagaaaaaaaaaaagagagagagagacagaaaagaaaaagaaatagagttcttccagaaacaaaccaccaaacagataatctgtatttaatttcactccaggcaggaggcagataattcatttttaatggggtaatatgaattcatcaacatggacagattcatacacagaattacaaacacaacttgcacacatcctgtagatataaacagtcctttgcatactatgtccggggttggtgccacgttgcccctaggtgtccatcaacctgctcaggggccggcaacgccccctggtggctgccacaagaacagtttaattctaatttcacttcattaccttcacactcgccctaaaaagatttatgcacatgccaagttcccttttttccgttcccattggcaaggaacttcatcccatacatgctcttttatatgtgcattacaaaagtaacaacactccagaagtattagaaaacaaattcagctgtaatttctatcatcgtatcctaacaacaattatttacacaatactctgtgcttcacgctcctgtttgagaggatgtttgacccatcaggcttccctggcacatgaacaaaactcagacacagcctcagctagggggcaaagcagtgtcaacacgcaggcaccctgggcagtatcattccccgaagcccctcatacttaatgcagtcaagagagaaccctagattccactccacctagattccattccacaaccctaaaactactcaagtttcccccagtgcagcaaatggtgtcaccattcatctggatgctcaaggcaaaaactaggacttggccttgatggttctttttttctggttccccagacccacaccaccagcaagtcctgtcaactctacttcggaatagcccatatgtccactactctctccatctcgcccgccactccctgtttcttcacccagatctcacctgcgcctcctaaccagtctttccatttccactttgctgctgtgtcactgtccattcccaagagggcggctacggtgagctttgagaaatcaccttttttttttcttctccccgagacagagtcttgctctgtcgtgcaggctagagtgcagtggcgcaatctcagctcactgcaacctctgcctcctgggttcaagcaattctcccgcctcagcctcctgagtagctgggattacaggcacgcaccagcacacccggctaatttttgtatttttagtagagacggggtttcaccatgttggccaggctggtctcgaattcctgacgttgtgatctgcccgcctcagcctcccaaagtgctgggattacatacatgagtcaggaggtcaggaatttgagaccagcctggccaacatggcgagaccatgtctactaaaaatacaaaaattagccaggcatggtgatgcttgcctgtagtcccagctactcaggaggctgaggcaggagaatcacttgaacttgggaggcagaggtggcactgaaccgacactgcatcactgaactccagcctgggtgaaaagagtgagactccatctcaaaaaaaaaataaaaataaaactcccaacagcttcccaccacacacctaaaaactcccggccgggcacggaggctcatgcctgtaatcccagcactttgagaggccgaggtgggtggattacccgacatcaggagttcgagaccagcctggccaatgtggtgaaaccctatctctactaaaaatacaaaaattagccacgtgtagtggcatatgcccctcctaaggcggaggttgcagtgagctgagatcgcgccactgcactccaccctgggcaacagagtgagactctgtctcaaaaacaacaacaacaaacaaaaaaactccctcctatgacttacaaggtgttatgtgatctggccctccccaccgttttgcatatcactctctgcgtatttcacaatgagtcaaccagctgggattggagtgttggtttttcaaacactccaaagcattctgcctgaggaccttggacttggaaggtcttcccctgatctcctcacatctggctcctcactattcagatctcagtttaggggttacaactttacttactgattgtctattataccgtcctgtctcaattctgtgcatagcacttgtgactatatttttcttgattatttatttattatggttattgtctctctcccctaaaacataagttccagaagggagaaccttgttttcctattttttttttagagatagtatctcactttgtcacccaggctagagtgtagtggcatgaacacagctcactgcagctttgacctcctggtctcaaggaattctcctgccttggcctcccaagtagctgggactacaagctcatgccaccatgcccggctaatttttttaattttttgtggatatgaggtctcatcatgttgcccaggctggtctctaacttctgggctcaagtgatcctcccacctcccagagtgctggaattataggcatgagctaccacatggccagaaccttgtttttcatgtttagtgttgtttccttagggcatagaaagtacttggcacataggagatgctaaataatatttgttatttattgaacaaatgaacaagtagaatattaaaaatcaagagtatgatgataactttctaaaacttaaataaaagaaaaattgaagctgggtgtagtggctcacgcctgtaatcccagcactttgggaggctaaggagggtggatcacctgaggtcaggaggtgagaccagcctggcccacatggtgaaaccccatctctactaaaaatacaaaaaaaaaaaaatagctgggcatggtagtgggtgcctgtaaccccagctacttgggaggctgaggcatgagaattgcttgaagccaggaggtggtggttgcagtgagctgagatcgcaccactgcactccagcctgggcgacagagtgagactctctctcaaaaaacaacaacactcatgcctgtaatcccagcactttgggaggccaaggcaggcggatcacgaggtcaggagattgagaccatcctggctaacacggtgaaaccccatctctactaaaagtacaaaaacaaaattagccgggcgtggtggcgggcacctgtagtcccagttactcaggaggctgaggcgggagaatggcctgaacccgggaggcggagcttgcagtgagccgagatcgcaccactgcactccatcctgggcaacagagtgagactccatctcggaaaaagcaaacaaacaagcaacaacaacaacaaaccccactaaattctgtaattctgattttatgcaaatactgtctatgaagggtccacagaattacctaagcaacattaatttgttttcaccttttttatatggataatctcaaaaaaaagaaaaattgatactgaaaccacttcaacttgaaaaattaacaagccaaagtctcagcaaaacatatcccaggaattatattaatttttttgctatttattttccattctgaattaatatgtaagttccatgaacatggagattgtagttctagtgctttggacagaatctggcacatggtaaatgtttaataaatatttcttgaatgaatttcctttccagtctagacaataaaatccagtgagtttgatttcagacgagattgggtgcgttcagggtggtatggccataaaaagtttgatttcagataatgtgattataatgggaacttaataacaaatatactagaactttctatattaacacaagtcttcaccctttcaaaacaatcaccctggagacctgtatacttattccagtgttgccgaccttgttctaaagaggtgcttcaaaaacgtttcatacaaggtttgtgtgtcttttatctcatgaaggtaaaaacagaaacaaaccagaacaaatactaccatggctttcattggaaatcaaattttggtttaataaattgaatttccagtcatgagattttctgatatgtctggtaccccttctggtagttttatttagactcttgtagaaaatctttcacatgaaccagtcttaaattattccaatcacaaaagaaaaagtataatgctttcattacctgtaattatcctgtaactcataagtccttttgctggtttcaatggacaggcttcctcgttgggacagaaaaataggtagcagttgggttgtctagctgtttttcgagtgtcgaagatcatcaagttacatgctttgtcccctgcaatgaaaggtttcataagcatgattttgaaatgcgattttctaaagagtagggcaagtaggaaaaacttcacttattatggagtccaacacaaacacctttgttcattttgttcacttgcttgctgaccgctgaatcatttccttttccttagcttagttgcttaaggcaattttaaaaaacattgggtttagctttttttttttcacaaggtggcaccgaaggcgaagaaggaagctcctgtccctcctaaagtcaaagccaaagcaaagtctttaaaggccaagaaggcagggctgaaaggcatccacaaccacacacacacaaacacacacacacacacacacacacacacccctaagacctgcatgtcacttacctccagcagctcaagacactgtggctccagaggcagcccgagtatcccgggaagagtgctcccacatgtttgaccactctgccatcatcaagccctgactactgatgtgctatgaagatagaagacaaccacacactggtgttcactgtggatgccagggccggcaagcaccaaagaggctgtgaagaggctctctgacactgatgtggccaaggttacaccctgagcaggcctgatggagagaaagaggcatgcgctctgctggcccctgcccacaatgctttgcatgttgcctacaaaactgggattatttattttttttattttttattttttgagataatgtcttgctctgtcgctcaagctgaagtgcaaatgcagtggcatgatttcagctcactgcaacctccacctcccaggttcaagagatcctcccacttcagcctcccgagtaactgggactacagatgcaagccaccacactcggattttttttggtattttttgtagagatggagtctctctatattgcccaggctagtcttgaactcctgggctcaagctgtttgccctagttggcctctgaaagtgctgggattacaggtgtaagccactgcacctggccatctcttggattctgaaagcatctcagatgcctaataaagccatgagtggagtcagtaaattatcatagatatcatggctccttccacacaggatctgagtagtatatggaatacagtctatcttttaatttttatctgtaccattctttgtgtttttcttccaattacccctctctccttgtcatatttgcttttctatgttccttccttccttacttttcactgttaactataatttctggtctcttttcttttcttttttgagtcagggtcttgctctgtcatccaagctgcagtgcagtggaacaatcatggctcacttcagccttgacctcctgggctcaaacaatcctcccacctcagcctccccagtagctgggacttcaagcgtgcaccaccatgcctggctaattttttgttttttgtagaggcggggtctcactatgttgcctaggctgatcttgaactcttgggctcaagcaatccatccccctcaacctcccaaagtactgggattacaggcatgagctaatgcacccagctgctggcttctttttctgttcctcttgtgtccaacagaaattaaaccctctattcatcatggcctagatttgattttgtcctccatttggtacagtctcacatctttgggaggtcagcgtatccctggtcaggctgaaggttaagagacacataggctaattgttaaaaacatacgctctgtcgaccatcaccaccactggtgctagtcaggcaatggtgagagatcaactccaactcccgagatgggaaggaagatttagttagcctctgcaggagttttatcacgtcatatccccattactcagataataacaggagtactcctgcttttcctttctcaacaatgtgataccagaaatacctttctttttagcacttaggtaaaggggagggtccataagctcaaaattgtatgcaagatattgtgcccatcgtgttatgtgcatttttctagagtatcatcgagttatcatagtgccttttgaaccctcggtggttaaaccatttctcaggaagtgaggaaaatgtttgagatccattaactgaggttccaagtacctctgcttgtagcaaagcagtaataggactttggcttctagaataaaacagcaaaccctcgtttcttagaattgaggagcagggctttgctgatgcctgtaaataccacacttacagtattcagtcctgcttgcaggtgatgtttctatttcacatacatgttgatgtcaacatttaaagaaaaactagaaatttaaattaaacctctgtcatttccataaattacttgcataaagtgtcccaaagcacactgctcaatgagaccatcgaagggatttttcctcctgaccccaagtatacggtgtcttctccacaccattttgcagcaataaccacatatcctactattgagttcaattctgacaccaactatccagagctggcatcagattccatggattatgggctcggtatcacaagactgccctcatttcagaagccagtagcaagtatcaggtctccaggtcacccacacttctgcctgactcggctactgctaattcagggattcccatgatcctaccccctcagatttgataatttgcaagaacaactaatagaactaaggaaaatgctgtatttactattacagtttataataagggatacaaatgaacagccaaaagaggctcctagagtcccaagtgcaggagactttgtccctggggaactgaggtgcataattctcttgacactgggatgtgttcaccaacttggatgcttcccgatcatctaggggtttttatgatggtctcattttacacaagcatgattgattaagtcatgggccactgtgactgaactcaatctccagtccctcccctgaggtgaagcctcactagcacaaactcaagtatagttgaaaggggctggttatgaataaccaaagacatgctcccatctcttgggaaattccaaggtttttaggagttctgtgccaggaactggagacaaagatcaaatatgtatcttttgagacaaggtcttgctttgtcacccaggctggagtgcagtggttcgatcaaagctcactgtaggctgggtgcggtggctcacacactttgggaggccagcactttgggaggccaaggtgggaggatcatttgaagtcaggagttcaagactagcctgaccaacatggtgaaaccacgtctctattgaaaatagtaaaaattagctggatgtggtggcgaacacctgtaatctcagctacccgggaggctgaggcaggagaatcacttgaacctgggaggcagagaatgcagtgagccaagattgcgccactgcgctccgtccggcctgggcaacagagtgagacatcatcacagacaaacaaacaaaaaagtccactgcagcctcaaccccctaggatcaagtgatcctcccacctcagcctcccaatagctgggactacatgcgtgcaccagcacgcctggctgattttttactttttacagagaacagggtcttgctatgttgcccaggctgctctcaaactcctgggctcaagcaatcctcctgccttggcctctcaaagttctgggattacaggaatgattcaccacacccggccattcactagcttttctaggcaacttgatggcaaggccttgtccatcttattcactgttttctctctggcaactaacaaagtgttaagtactcaagaaatttagtttttttcatttagagaactcggacagggtcataagtaaaattgaaaaaaggttttactaaaatacacagtatacttctcttttcagtacaaatacttaaatcctaaaatatgcaagtcctggttcaaacctatgggtctcagtttcctcctgtgtcatgaaaatgggccagactaattgattccccatcccattagagttctagaagctgtagttacctagtagtcagtgtttttttgttttttttttttttttttttttttgacttatcctatgccaccagctccaaggaaggagacgaagtggaggttttatgcttccaacttaaagatcaaatgctgattttcccaagagataagaattctattttttgtctcaaccccttttctctgtttacattttctttgtaatatcacactgtattccaatactccatgctgatggcagctaaccatttcaataggatttttgttttcaatattctagataccagttgggatataacaccagtgattctcaacctcttgtctacccagtcacctgagggatatatacatacattcatcaataactttgactcagcttaggagaggggagggcacacttgtagaaaattctccagtgattttgtcacttatattcataccctgtcgagaatcactggtataagttattcagccacatcccccagctcctgaagccacaaaacacatggaacaaaggattgccaagaaaccactatttacctgatatgttttttgttgaacagcaagaattaatgcagtcttcttgagttgaagtatatacgggctcattgcctctgattcccttagaaagagatgactggatgtcaatgacaacatcttctagactctttttgaggcaattctgactagcagacagccttagtgtcaggaagcaaattattaccaaagtgtaagtcaagctcccttctcccccgaagaacattttaaatttcagtttagttttggtcttcaaaggtcaaggataatcctccctctggtcttagtttgctttaagaaggctgcacagatgatgagatttctctctagaacaaaaatggaaaatcatcaatgagttttgtttctttaacaaacaagggaagaaacatttcatttccttaaagtcaatgaaaaggatccacatacaatttagagaagaaaagatacacgtattttttgtttcacttttagtaaatttaagacaacttttcattaaacatttggcaaagaactaataagcataaacaaacatactacctcaccaatgcttaaaagctgacaatgcttatgaaggaacaggtataaacagtaggcctgcctcggaattctacaatccttccctcttctaactcagagcggagagggcacacatttctagtcactgatgaagcagtagtaataggtttgagcatatttcctttctcagtaataacaatcagcattttaaaatcatctactaggggctaggcgtggtagctcatgcctgtaatctcagcactttggaaggctgaggtgggtggattgcttgagctcaggagttcaaaaccagcctgggcaacatggtgaaaccctgtctctactaaaaatacaaaaaattagctgggtgtggtggcgcatgcctgtggtcccagcgacttgggaggctgaggtgggaggatcgctggagcccaggaagttgaggctgcagtgagccgtgattacaccactgcactccagcctgggtgacaaagcgagaccatgtctcaaaaaaaacttaaaaagtaaaaataggtgacaatatactagatggtagacattgtgctaaggaatttaccactcttttgaattgttattctctttaatttattaccatctttaatctttataccaactgtaatggctaatactgagtgtcaacttgatttgattaaaggatacaaagtattgattccgggtgtgtctgtgagcatgttgccaaaggagattaacatttgagtcagtgggctgggaaaggcagacccaccctgaatctgggtgggcacaaccaaatctgctgccagtgcagttagaatataagcaggcagaaaatgcgaaaaagagagactggcctggcctcccagcctatatctttttttttttttttgagacagagtattgctgtcgccaggctggagtgcagtggcacaatctcggctcactgtaacctccacctcttgggttcgagtgattcccctgcctcagccttccgagtagctgggactacagacgcatgccaccacgcccggctggttttttgtatttttagtagagacggggtttcactgtgttggccaggatgatctcgatctcctgaccatgatccgcctgcctcggcctcccaaagtgctgggattacaggtgtgagccaccacgcccagccccagcctatatctttctcttgagctggatgcttcctgccttcaaacatcagactccaagttcttcagttttgaaactccttgctcctcagcctgcagatggcctattgtggggccttgtgatcatgtgagttaatacttaataaactcccatatatatatatatatatatatatatatatatatatatatatatatatatattacactagttctgtccttctagagaaccctgactaatacaacaaccttgcaaaaaagctattattggccgggtgcggtggctcatgcctgtaatcccagcactttgggaggtcaagtcacgtgggcggatcacctgaggtcaggagttcgacaccagcctggccaatgtggtgaaaccccatctctattaaaaatacaaaaattagttgggtgtgatggcgggcagctgtaatcccagctactcgggaggttgaggcaggagaatcacttgaacccgggaagtggaggttgcagcaagccacgattgcaccactgcactccagcctgggtgacaagagcaaaactccgtctcaaaaaaaaaaaaaaaagctattattttcctcattttataatgaagaaactgagatagtctttcctattgctgcttctccttaagaagtatcaaatcagagttagaaaactctaataatctaattctagaaattagccagtcagcaggaggaatacgctgcctcagttaaaggaaagtttaggggcaggttttctttttgacagccttaaaaatacaaaagtcacactatgtataatgccaactctattgagatgctggttcttttaggaaaaataaatgttaaactggcaagacaatacaagaaattatcctcacctatcaacctccacatttccttttaacatttcattaaacattttgttgaatacaaattgtttgctgaatgatagcttagagcagaattactacttctttaacctttgtttattaacccctttgatagtctgaggaagctcaggatctcttttgtgagacatatttaaaaatgcataaaatggaatatgtaggattccaaaggaagccagttatagtgaaatataattaccaaaatagattttagaatgtccctacaaaatcctggtgaaagaaatcaaagaggagctaataaatagagagatataacatgttcatggataggaagactttattttgttaacatatcagtgcttcctggccaggcgccatggctcaagcctgtaatcccagcactttgggaggccgaggcaggcagatcatgaggtcaggagatcacaaccatcctggctaacacggtgaaaccccgtctctactaaaaatacaaaaagttagctgggcgtggtggcggccgcctgtagtcccagctactcgggaggctgaggcaggagaatggcatgaaccccaggcggagcttgcagcaagccgagattgcgccactgcactgcagcctgggcgacagagcgagactccgtctcaaaaaaaaaaaggtatcagtgcttcccaacttgagctacagattaaatacagtcttaatcaaaagcccaaagttattttttggatatcaaccaactgattttaaaatttacatggaaatgcagaaaagaccaagaacagtccagaatactaaagaacaaagttggaagactgatactacctgacttcaacacttaccgtaaagctacaataatcaaaaaagtatggtattagaaaaagaatagacaaacagatcaatggaatggaatagtaaacccagaaatagaccctcacaaagagagtcaactgatctttgacaaaggagcaaaggggattcaatggagaaaggacagtcttttccaaaaatggtactggaacaactggatatccatttgcaaaaatgaataaataaataaatctagccacatactttacacctttcacaaaatttagctctaaatggatcacagacctaaatgtaaaatataaaaccataaaatttctagaaaataacagaagaaaatccttgtgaccttagattaggtgatgagtttttaaatacaataccaaaagcacactccatgaaagaaaaatttgatgttggacttcattaaatttaaaaacttctgctctacaaaagataccgttaaagagaatgaaaagataaaccacagacttggaggaaatatttgaggtggtttttttttttttggaggaaatatttgtgaaacacacatctgataaagcagcagtccatagcctttctcgcaccagggaccagtttcatggaagacaatttttccatggacggcgttgtgggggtatggttcaggatgattcaagtgcattgtatttattgtgcactttatttctattattacattataatatataacgacataattatacaactcaacataatgtagaatcagtgggagccctgagcttgtcttcctgcaactagacagtaccatctgggggtgatgggagacagtgacagatcatcaggcattagattctcataaggagtgtgcagcctagatccctcacatgtgcagttcacaacagggttcgtgcgccgatgagaatctacggccaccactgatctgacaggaggtggagctcaggcagtaatgcataatgtaaatacagaggaagctttgctctctggcccactgctcacctcctgctgtgtggcccatttcctaataggtactggtctgcggcccaggggttggggaaccctgtgataaaggactggtatccaaaatatacaaagaactcaagtcagcaataagaaaagaaactcaatggacagaagatctgagcagacaccttatcaaagaagatatacagatgacaaataagcatatgaaaaggtatctaacatcatatgtcattaggggattgcaaattcaaacaagataccactacccacctatgagaatggctaaaatccaaaaaatggacaataccaaatacaaggacatggagcaacagaaattctcgcctgggcgcggtggctcacatctgtaatcccagcactttgggaggccaaggtgggcagatcacttgaggtcaggagtttgagatcagcctgaccaacatggtgaaaccccatctctactaaaaaaaaatacaaaaattagccagatatggtggcaggtgcctgtaatcccagctacttgggaggctgaggcagaagaatcgcttgaacccgggacgtggaggttgcagtgagccgagatcatgccactgcactccagcctgggcaacagagtgagaccctatctcaaaaaagaaaaaaaaaaaaggaaaaattctcattcattgctgttggggaatgcaaaatggtacagccactttgggagaagtttggcagtttcttaccaagctaaatgcagccttaccatacaattcagcaattgtcctcctatgtattcactcaaatgaattgaaaacttatgtccacacaaaaatctgcaatagaatatttgtagtagctttattcataattgccaaaaactaaaagcaaccaagatgcccatcaatagatgaataaacaaaatgagatacatccatacattggaatattactcagtaataaaaataaatgaactatcaagccacaaaaagacatggaggaatcttaactgcatattcctaagtcaaagaagccagtctgaacagatatgaatctaactgtatgacgttctaaaaaaggcaaactacagcggcagtaagaaggccagtggtcaccaggagaacaggagtgggaggatgaatcggtggagtgcaagggatatttggggcattgagactattctgtataacactgtaatggaggatacatgttattgaacatctgtcaaaacccatagaaatgtaaaacacacagagtgaacattatgtgaactatggacttttagttttaaaaaaaggtaaaaccaaaaaaaaaaaaaaacccagaaacaaaccagtatatggtaataaaacacaagtctaatacttttcttgctgtttgtcaaaattctgtatacagtaaaatagtaacatttattgcgtctaaaatgccagtttctatgctaagcactttatatatatcatgtcatttaatctttacagatcccattattatcctcattttagttaaaacttacaaaaagttgtgggacataatatgtgcttctttattaacctattaagtaacaagtggtcatctaataactgccataattttgacgtggtattgagtatagataatattttgaaacgtgcaacaagtcatgtgatataaagatatcggcaatatttacagggggcaaatcatagctactgctaatactactgtggcttttgcctacattccatttcagaagtcggtgaaataataattttttccactcaagttcacagacatcctgaattctatccatggataccttatcgtggactccccaggttaataattctggccaaggtacttaatacgctgccatattttgcaagcctctagggaatcaagagaaaaccaggccaatactttattttgaatggattctaatgtagcctcttttcaagcttttgcaaagaaacctgaactatgtaaggagatggggcaggagttgttttcagtatgcagcattgagagaagtgtttaagagttttatatcattaaagaggctcagcaatattaggttagcgacgttttctaatccattattatttaggctttaagggcctgaagtcgagttgaatcttgttgaaagacggggtaaaaggatacaggcgggtgagagaggatgcccctgagttttaacgtctgcatacaagagtcgctaaaacttactcgcacgtaattagttcaaatattggaaatcgtcttacagcacactataatttaccaagatgcttataactgtatacacacacacactctacagagaattagacaattagcagtttcaataatgaatacagagtcaacgacaagaaaacagggaacattttctcttcctttgaggaaatgcatgttgcctactgagctattcttctgcctctccttctgatgtcaacgcagagccagagccatttatggcaggtgccttgagcccgcctagaggtcccctttggaatactgcagcgactcaaggatcctggtcagcccttattggccccagctggtcctttggatgctcgggtgtgggtgaaggagcctcggcccctggaaaggaggggaccgactctctccgcaggtagcgacgtcgcctgcggccggtcgggggtgggtattggggagacccctttacctggcgtcgagaggaccccggcgcccctgctgccatccaggtgcgaggacagctctgtcgcgcccgcgggaaggaccggcgaatccgcgcgggggtctcggcgaggaccgcagcggatgctccgcagctcccgcaccggcctggcgggttttgtggttagcaagttcctgcttccgtcgcagcgacggcaagtttgccgcgggggaagggcacgttcctgccctgcaacccggagctgcttcccggcaacattagcgcgtccctccccgcggaggctccgggctcccggccccagcgctgagccccgcagggaggtggctccccccaccgccccgcgctcccccccagctcagccacaccgctgaccccgggctgggcgcgctgcgagggggagtgcgtgcctccctgctggtggcccgagggtctgcaggtgagccttgcctcgcggcccgcgcaagttaaaataaatgcacatggggaaaatgtcaaacagtacaaaaatagacacagagacaagtctacccctcacccccgtgccccagtctcctagtctccctcctcagaggcaaccactgagagcagttttttgatgttcaagggcttatagtgcatcctattgggggcatagttctgagaatcctctttccataattggaggatggagtcctcaattaaagatggcaattcttgagttaaatattatctgcaagacaaacttcagggaaggtatttggctttctgcgggatttattgtttgtagataggataataatggtgaaaatgctggtgtctgtaacatatattaaaactgtatccctaacacttagcatagtgcctggtacacaataggtgctcagtaaatatttaactaaaatatttttgttgactgaatgaatggaaaagaactgcatagggcataggttgtggaagtttctaaattactgctggccccatccccacctccataaacacacacacaaatgcaacgttactaaaccattgacacttagtttgccatatggtctaacctttgacagtatcttcacctctgttttgaaagagcttgcagacctgaagcgctatgcaattgcaagttaagtctaggcctgtacggccaacagctacacaccctagtcttaaccaataactacaggaggattaggttgactgagaatgcttgtgaacaaaggtccattgtgtgaaactaactctacttgtaaccaaaggatgactcttgaattacaatgttgctaaagctaggtttgaaagagttaccaaagaaaagtaaacaccagagtaatttcccattgcagtgattttcctgatgcaacaagggactgatctgcaagtgtgttttatcttttatcatctgatacacttcagggttcagggtgtagagctatcacagtttttgaatctctctacatggggtaatccatgctagttacaaagtagacctttccattattagaaacttcgtattcggtgctttaatacaatgaacctgtttctttttttgttttgttttgtgttttgtttgtttttagagacggagtctcgctgtgttgcccaggctggagtgcagtggtgtgatctcggctcactgcaacctccacctcccgggttatagcaattcttttgcctcagactcctgagtagctgggactacaggcacatgccgccacgcccagctaatttttttctattttagtagagatggggtttcaccgtgttgcccaggctggtctcgaactcctgagctcaggcaatccgcccgcctcggcgtcccaaagtgctaggattacaggcgtgagccactgtgcccggcctgaacctgttttcattgaagtgatatgttattttttcagttatgacagtgaacaaaggatattgattaaaataatgattaaagaaatattttctattatatatgtttaatttataaatatcattgtttatttattcatttttttagacagggtctcgctctgttgcccacactggagtgcaatggcacaatcacgactcactgcagctttgaccacctgggctcaagtgattcttttgcctcagtctcttgagtagctgggaccacaaacgcacaccacacccagctaatgttcttaattttttttttttttttaattttgagatggagtctcgctctgttgcccaggctggagtgcagtggcacgatctcagctcactgcaacttctgcctcccaggttcaagcaattctcctgcttcagtctcctgagtagctgagattacaggctcatgccaccatgcccagctaatttttgtatttttagtagagtcggggtttcaccatgttggtcaggctggtcttgaactcctgacatcaagtgatctgcccaccttggcctcccaaagtgctgggattataggcgtgacccaccgtacccggtgttttaaattatttgtatagatgaggtcttgctacattgcccaggctagtctcaaactcctgggctcaagcaatcctcctgctttggcctcccaaagtgctgggattacaggtgtgagccactgcacttggcttacttaaaaataaaataaaaactttaatttctggcctgagtcataacttagaaattatatccattgtcacttcatttcctgaagagattcttgacactcttctctgagggttagaagtcccatctatgtggagaaagatttctttaaaagtaatcggaaaacatgtattaagcagccaggcgcagtggctcacgcctgtaatcccagcactttgggaggccgaggcgggtggatcacgaggtcaggagatcgagaccatcctggctaacatggtgaaaccctgtctctaataaaaatacaaaaaattagctgggtatggtggcgcgcgcctgtagtcccagctattggggaggctgaggcagaagaatggtgtgaacccaggaggtggagcttgtagtgagccgagatcgagccactgcactccagcctgggtgaaagagtgagactctgtctcaaaaaacaaacaaacaaacaaacaaacaaacaaaaaaaaaaacatgtattaagcacctgcaggggaaactaaagaccagtaataccaatgagatctacctttaagatgttcatagttcagaaggagaaaaagtaaatcaatggctgtgtaaacagttaagtgtgatgaaggccaggtgtagtggctcatgcctgtaattccagtgctttgggaagccaaggcaggaggatcacttaagcccaggagtttgaggccagcctgagcagcatagcaagactccatctctacaaaaaataaaaattagcatggtgtggtggtacacgtctgtagtttcagctacttgggaggctgagacaggaggatctcctaagagcctaggaggctcttaggaggctgtagtgagccatgatagcatcactgcactccagcctgggcaacagagtgagaccctgtccctgccctccccaagaaaagaataaatgttatgatagaagatggcaactaaaaaggctcagagaagggacatctgatcccaatttctgggaagaggtgttaattattgaagaatgaagttattagcagatgaggaggaaaaggctgaatatttcaggaataggaaactgcatgaccacaggaaattcagcctgttaggaaggttaccagtgtacacagaagaatagagagagaggctggggtcagagcaggaaggttttcatatgttaaatcttaaactttatcctaaaggcatggggagttcctgaaggctttttgtagggcagtgacaggtccagagacctaattaatattctagaaaattatctctacctgccacaggagggatggattgagggacgtgaggccagaggcctctcttccaagaaacggaagtgataaggccctgaaatgggcatgcagatagaggagaaattaagaggagaggctctccaggacacaacgattggttggatgcagtgctgacagtaagcaggcttctggcttgggagcctggttgggtgggagtaccaggtcatataaagacacgggaagaggagtcagtctggagtggacagaggcatgatgagttttgaaaacgtgaatcctggttttatcactcactagttgtgtgaccaagaataaatcacttaacttttctgtaaaattaggaaagtggtatctactttacacgcaggtcataatatagacctttttatgcaggtctaacatatagacctgcagacctgtaaactcaaaaaggctgttcaattgctagttattacatatacaataacacagtttgctgctcatgtagaagggattttaaaggtgctaaaagacatcaatctgaaatgtttcctagctataaagctcttccagcagactccttatgttatataaatgctcatttaattttcttgccaccagactgtaagcttcctaagtacagggattgggccttgttgaattttttatttttaacgtgtagcaagtgcctagaacatttcaggttcccaagaaatgttaagccagtgaaggaaggaattttatcttcatatgttcttttactgaatatagctttatggatatggaatttgtataccatacaatttaccctggtaaagtgtactctacagtggtttttaatatattcagagttgtgcattcatcattacaattttagaacattttcatcaaccccagaaagaaaccccatacccaataatagtctacatttcccttccacccgtacccctcctcggccttaggcaacactaacatatttctctctctgtagtgcttctcctggacatttcatataaatgaaatctacaatatgtggtcttttgtgatacgctttgttttttttttttttgagacggagtcttcgctctgtcgcccaggctggagtgcagtggtgcgatctctgctcactgcaagctccgccttctgggttcaagcgattctcctgcctcagcctcctgagtagctggaaatacaggcgcccgccaccacgcccggctaattttttttgtatttttagtagagacaggatttcagtttgtcagccaggatggtctcaatctcctgaccccgtgatccgcccgcctcggcctcccaaagtgctgggattacaggcgtgagccaccgcacccggcctgacaggcctttttcatattgaataatgttgtcaaggttactctatgttgtagcatgtatcagtatgatttcatccttccctcattttggctgaataaatattccatgattaccacactttatttatccattcatcagttgatgcgacagactatccttttaagaatgaaatgtttattcaaaaggaagcataaaaaacaccatcacatcagtatggactggtgtatggaacacaagacaaatatacttttatgtggaaaaggggaaacaagaaccagaatgagttattctccattcctcaccccttttacctcctctctcaccttcccctcaaagaggaaatctgggaggggatgcaaggactctccaaaagggaatggtctcactgcttagtgggcccttcccagtcccatcagcctggtgtggtttatgtaaacctcaagactagttagacacaactttctagaagcctgccctgatctctcaggcagtttttagttctatcttcatattcccagagaacactgtacttagattcatttgcatttttctcattgtattgcaatggtgagcagaggaaagagcatcagatagtcctaaatagttcgaccactgaccacctgctgaccatggaggagtcacctacttacaggctgcagggttgttgtgaaaattaaataaggtaaaataggggaaattattgtgatatagtagagtggaagggacttaaaaatcatttagtcaacttgacacttcttctgagacttttttttttttttttttttttgagacggagtctcgctctgtcgcccaggctggagtgcagtggcgcgatctcggctcactgcaagctctgcctcccgggttcacaccattctcctgtctcagcctcccgagtagctgggactacaggcgcccaccatcatgcccggctaattttttgtattttttagtagagacggggtttcaccatgttagccaggatggtcttgatctcctgacatcgtgatctactcgcctcagcctcccaaagtgctgggattacaggcgtgagccaccccgcctggccagagactacattttatacatataaaatctcaaggcatttacttgaaatttcttgacgcagacaatgtaatataaaatgagttgcaaagttcggagaacgctagagccagctaactccttgatggcattgcattgctaggtctactttcttgccctagcaaaaatggcagtttcctttctggattactccctcctcaccttctgttagtttcagagtgacttgttgataactgccaaggtccccagaaagcgcctagccaaaaaggttcttcacttctctttaaagatgtgcactccctaatacatgaaacagcattttctatttcttaatttttctctcatttccagctgctgctttcaccgtcttctggtatttttttgtttggtcgtccactgctaaactcccagctcttcagaattcaaaatgagctttgcatccaagctgttgtgggttcgaatcctgggtctatctagcgtttctttctccatctgtaaaacagggttaaaaatacctattttgtaaagttgttctcacatgtgggtattgaagagcttaatagtgtgggtggtgttttaaaggtgacgcatccttacaacaggaaagggcttaccctcttccgcagttctggcttcgaggaggtcaagccctttaaggtggcatcgccctaagtcgcaggagcgggtctctccgcccctccctcgggccggggggcggggcctcctaatccggaactgaaggtcttgcgtagccggcaccgcccatctgcgtcccggaaggagcgagcttgcggagcgtgaaccagtgagtgaaagcggcgccgcccgccggccgcaggtgcggcaaagccagtgtcatctgccggttctcttagggctcccggaaagaaggagggctagccgcgtgcgttcgcgccgcgcctccttgcgtttctgttccccaaatagggcctctccttctcccgccgcccaggcccctgcgtgggctggacgcgtcagccccacacattagcctcgctgcggcgcccagactctgctttgcctccccgtcccggtccctggcccctgccctgtcgcccgccgccggagcggtgaccgcccggcccgccgttcttctgctgccaccgctgtcggcaccatgggcagtgagcagagctccgaggccgagagccgacccaacgatctgaactcctcaggtcggtgtcctaacctcccaccctcctccagcccgccctgtccccttgcagagcgggctgcctcccagactagggtcagggactgcggacgggaacgcacagaaaaagccttcaccgtgctagtaggaaaaaaaaaaagtcaccatctgtcctggcctcgattcccctgatggaagtgcgtgtgactgcaagctaagccagcgtgggcgccagtgcccttatttattttcaaaacagccgtttctcccagctacagcctcctgtttaaaagacgagctaattaatttttggctctagtgctcatggctgatgtagtgagatttggctcacacagtggatggattataggacctctaagaacagtctgtttcttaaaaacgggtgttagaggttccttttctgaagggatatgtgataggtgtccacttgctttgaaccctttagtgcaaaggtctccagaaacagctttttcttctcagaaggtgtcttggtccgttttctaatcttgtagaggttggccagacagcaggcactggtgttttccattgttgttctctgtccatgatttttagacttctctaagcgtttgagacaagaatgggaggattattgtgtttgcaatacagtgagtgttcaataaatagataaagcagctgatgtttaattgaggaccatttgctgctttttttgttacccacacgctaggacagctgggagtgctttggttaagctccggggttgctaacgcaaattggttaaatctggggcctaaaaagagtcgccgattttagaagttctctgttcttgataggagctgtaattcagaaataggcaagctaatagatctaagggtgtttcactttaaggtgtgactttcaagactagttcagacctacattctggggactggattggggcagctttgaatggtgagcagcatctactagctttgctacgtttttctatttccttggaagggccagagtgtcatatctgttataagaaatataataattgccacctttgacattcttgcctctatggcagggcagaaacatattttagggggaagcggtgtggcatctttttaatttgttttcttgcccatgaaccaacagcattcgagcatttccgatgttagaatttgcctattcccctgtgcccggtactttacatacatttacatataatttttgcagtaatcccattttacagataaagtagtagaggttagctagagtgttttgaagtcccctttcctctggtatctggggaaggaggaatcacaatttatagcaggaaagatttctggcatggcttttgtaaaatgttaggtaaattaccaaaacaggtaaataaatatttcttgaaaagaaataaaagcagcagagatttttctagaagagtgaatgccaagcctccggagacgagcttctaggaggcagaacagttctatggcatccctggattaacctttgagatatgactataatgagcctgggaatattaccttctagagcataaaacactttaaagattcattcttgtcccagtctggaagatatttgggggagaggatgatttcttggtctagggagtcctttataatttgaatcacttccctccaaatggattactttctcccaaggaacctgaattgatctccctctttgtcctccaaatttctgatttttgcctcagcctagaatggacttactggctatttttgccctggactaatgctataattttaagagtgagggggctgtagtcctagctactcaggcccaggtgggaggattgctggagcccaggagtttaaatccagcctgggcgatgtagtgagacttgactctttttttttttttttttttgagacagtctcactgtcacctaggctggagtgctgtggcatgatcttggctcactgcaacctccgcctcccggattcaagcaattttcctgcctcagcctcccaagtagctgggattacagggacatgccaccacgcctggataatttttgtatttttagtagagatagggtttcaccatgttggccaggctgatctcgaactcctgacctcaagtgatccacctggcttggcctcccaaagtgctgggattacaggcgtgagccaccgtgcccagccgccttgacttaaaaaaaaaaaaaaaagagtgaggaggctgaagcctcgggaataggccagtcattcgggggttgagaacaggtttttttcctggacttactaaacatagctggcttgatgtggtagggtggatagacagctttgcaactccagtgtcgcagagatgggccttgtgtaccaataacttgtagatgtctaattcctttcctaactgtctagcactgctgactttgggcaagtcacagttaaattttgtaccctttatttctcattttagaaatagggagatatatatatatatctcaagatagcaggagaattaaagagaaagtaaaaacaatctgcctatacttttgtgtgctgaaaaagaaaatatttagttatgaaagaagttcattcatgttatataatcctgtaatgggctgggcgtgatggctcacacccgtaattctagcactttgggaggccgaggtgggtggatcacgaggtcaggagttcgagaccagcctggccaatatggtgaaaccccatctctactaaaaatacaaaaattagccagatgtggtggtgcatgcctgttgtcctagctactcaggaagctgaggcaagagaattacttgaacccaggaggcggaggttgcagtgagccgagattgcaccactgtactccaacctggcgacagagcgaggctctgcctcaaaataaaataaaatcctgtaatgtctgagggtttttgttgttgttgttgttttgttttttgagactcttgctgtcttacccatgcagtggtgtgatcatggctcactgtggtcttgacctcctgggctcaagtgatcctcccatctcagcttcctgagtagctgggactacagtgtgcaccaccacatctgactaattaaaagaaattttttttttttttttttttttttttagagatagggtctcactatgttgcccaggttggtcttgaactcctggactctggtgatcctcccactcagcctttcaaagtgctgagattacaggcatgagccaccacacccagcctgaggtggcgtttttgtttgtttgtttttgagacagagtctcactctgttgcccaggctcaagtgcagtggcacgatcttggcacaccgcaacctccgcctctcgggctcaagtgattctcctgcctcagcctcctgagtagctgggattacaggcacccgccaccatgccccgctaatttttgtgtttttagtagagacagggtttcgccatgttggccaggctggtcttgaactgctgacctcaggtgatctgcccacctcggcttcccaaagtgctaagattacatgcatgagccaccgtgcctggctccagcctgagcttttaaaaatactatagaaaacagtttctataattcatccctgccaccccaaccccaactgcaagatagctacattttataaaattattctttttaatcactacaccaaaaactgctttggtgaggcagagatgcctaatatgcatctcctaagcagtgtaactttattttcagtgactccttcaccagccaagcatagagccaagatggatgatattgtggttgtagctcagggctcccaggcctcacggaacgtcagcaacgatcccgatgtcatcaagttgcaagagattccaaccttccagccccttttgaaaggtaaaggattgcgttttgttttatctgaacttgctggagacgtttgtgtagccctactactttccctctacttatccatgtatcttgctctctcatctcctttaggtctttgcttaaatggcatcttctcagtgaagcctttcttgatttccttaattaaaactgcagcccctttgcctacctgtttttctctatagcacttaattatcattgacctattgcaaatatctttatctgtctatatttctctgctagaatgtgagctccatgatggcaggtattttctcttttgctcactgttgaattcccagcacgtgaaatataatctggtataagatagggactaagtgaatgaatgaggttggaaatggcccttccctgttatattcccatggaaagattttcattcttatttgtgatctggacagtgggtggactagttcagatccatagagaaaaatctccatcactactgatacactcgtaattaatcctggcggcagttttatatgagagtgtgtgtttgagaagagagattacccacccaattagcatatactgtggtagttaccttttgaacgaaggccacaactttattatttttgtatctctattaagtagtggagattattttatattaactggtgtttctgctgtaagagtccttcagttctctcctccctcacccccaccaaagattaggaaataatgaacataaggccctggtttacttaacttggtataatacagtgtaaaacatcttacatttacatagctatttgaattaaaatgcccctcctcatacacatatcatccctttaattcttacatcattaaatgtgtttcaatgattggggtaagataagcttcttataagccttttataaggcagctggcatacacagaggttgtacttgaaccttcttcattgatgtcaaatcctatattacactgttccacactatttagaaaacaaaaacaaatggtgctttatagatgatccatatattgtcttattcttaccagtgcttcatctgtttcataaataaggaaatacaagctttcagtttcttttttattattatttaagttttagtgtacatgtgcacaacatgcaggtttgttacatatgtatacatatgctatgttggtgtgctgcacccattaactcgtcattcacattaggtatatctcctaatcaatttcttccctacaggcctgagagttagactttggtaaacattctggctcttatgtaaaacaacacattatatcatgttactcatcttttttttttttttttttttttttttagagttttgctctgtcacccaggctggagtgcaatggcttgatcttggcttactgcaacctccacctcccaggttcaagtgattctcctgcctcagcctcctgaagtagctgtgattacagatgcctgccaccacgccaagctaaatgtttttattattattatttttagttgagatggggtttcaccatgttggccaggctggtctcgaactcctgacctcaggtgatccacccacctcggcctcccaaagtgctgggattacaggcgtgaggcaccttgcatggcctactcatcttcttagttttcatgattttgaggaataatgtgattctctaaagaagttaacaatagtagggcatggtggctcacacctgtaattccagcactttgggtggctgaggcaggaggatcacttgagtccaacagttcaagaccagcctgggcaacacaatgagactctgtctcaacagataatacaaaaaattagccaggcatggtggcacatacctgtcgtcccagctagttgggaagctgttgtagaaggatcgcttgagcccaggaggtcaagggtgcagtgagcagtagtcatgtcagtacacttcagcctaggtgacagagtgagatcctgcctcaaaagaaaaaaaaaaaaagccggccaggcgctgcggctcatgcctataatcccagcactttgggaggccgaggtgggtggatcacctgaggttaggagatcaataccagcctggccaacatggtgaaaccccatttctactaaaaatacaaaaaattaggccgggcgcagtggcttacgcctgtaaaacagcactttgggaggccaaggcgggtggatcatgaggtcaggagatcgagaccatcctggctaacacggtgaaaccctgtctctactgaaagtacaaaaaaaattagccgggtgtggtggcgggtgcctgtagtcccagctacttgggagggtgaggtaggagaatggcatgaacctgggaggcagagcttgcattgagccaagattgtgccactgcactccagcctgggtgacagagcaagactccatctcaaaaaaaaaaaattagctgggtgtggtggtgtgcacctgtaaacccagctactcaggaggctgaggcaggagaattgctagaaccaggagatggaggttgcagtgagctgagactaccacttcattccagcttgggcaacaacagtgaaactccatctcagaaaaaaaaaaaatatctgcatataactttcaacttagccaaaacttaactactaatagccttctgtttactagaggccttactgatagcataaacagttgattaacacatcttttgtgttatatgttattatatactatattattacaataaagtaaactagagaaaagaaaatgtattaagaaaattataaggaaggccaggcacagtggctcatgcctgtaatcctagtactttgggaggccgaggaggatggatcacttcaggtcaggaattcgagatcagcctggccaccatggtgacaccccatctctactaaaaatacaaaaattagttgggtgtggtggcgtgcagctgtagtcccagctacttgggaggctgaggcacaagaatcgcttgaacccgggaggcagaggttgcagtgagccaagatcatgccactgcactccagcctgggtgacagagtgagacttggtctcaaagaaaaatataaggaagagaaagtatattaactattcattaagtggaagtagatcatcagaaagatcttcatcattgtcttcacgttgagtaggccgagaaggaggaaaaggaggggttagttttgctgtcttaggggtggcagaggcagaagaaaatctacgtataagtggacccacgtggttcagacccatgttgttgttcaagggtcagctgtaattcgttttatgattaatcactagtaggggaaatatctagaagacttggtgttaagggaagctaacctcagatttgaagtcatcactgagggctggccatggtggctcacgcctgtaatcctagcactttggaaggccaaggcggttggatcacctgagcacaggagtttgagactagcctggccaacatggcaaaaccctgtctctacaaaagatacaaaacttagccgggcatggtggtgggcacctgtagttccagctactcaggaggctgaggtgggagtatcacttgagccctagaggtggaggttgcagtgagccaagattgcatcactgcactccaatctgggcaacagagcaagactctgtctcaaaataaataaatcatcactgagtgccctgaaagtgaataattaatgtgatgcagttaatgcaatgcaactggacctggttgcattgataaatgagttttaactgggactttgccaccaactattatgttgtctggctttgtttttccacctttttgagccttggttattaagaacattgagaataggtgaggaaggaggaaggctagtaaggagcagattataggaagaggttatcggggatttggttaaggaaggtagagatgagatcatggctcactccagcctccacctcctgggctcaagcgatccacccatctcagcttccagagtagctgggactacagtgtgcaccaccacacccggctaattaaaatacatttttttttttttttgtagagacagggtttcactatgttgcccatgttggtcttgagctcctggactccagtgctcctcccaccttagcctcccaaagtgctgagactacaggcatgagccaccatgcccggcccgagtttcaaaaaatactatagaaaatagtttgtataattcatcccccccaccccaacccccacttgatgagagtggcgtgaatctagaaatgacaacatgtggctgtggccagactatagcaaacaaaaagccagtgagcattgaaggtgatgctcatgtttcacttgtgaagacgaaacatcttgggccgtgattaggaaagataggcaaagggggtggaaatgataagtttaattatgatgatagtatcttatcccccatgcttctacataatagctattgttctttctgtttttatagattaaaatattgaggcctagagagcttaaattaattgcctaaagtcacatggctgtaagtgatagcacattttaagattgcatcaggacatagaataagacttagtttccaattctagcaaagcccattatagaaatcactaggatatacaggaactagcgtggtgggtatgaggttgtttgggttttgaggtgcagcatttgttgcagagcctcctgctttgacgttgttctgcctgataattaaaagccctaccctctgcctgctgggctgctgcaggggccaggcatcactgtcgcctttatactctgactcttttttccccctttcctgctttcaggatgaggccattcctcaaaatagtaaaaaggccacacagtgaaggctgtaccccccaggtttgatttcagaaagcttttattcaacttaatgacagtttattctttcaaaacaatatattgaagtattacacagagttcactattgtttcataatgtcatatgatgtaatgctaatgctggtgggtgatctgcagaggcagtggctgggcgagtttggggctatttgtatgactgaggtaatgtttgcatttttaataagcaagcagattctttctttggccttaacccttttgcataaatataccagagtataatttatgctccataatccaaatatctgttcctttttttatcaaagggatttctgtttttcatagcaatgtctgaattagtaatttattttgacatgtaaagcattttataggaaatgaaagattagaaaattagaaagtagctacaaatggctgtgacagaacacaaaggcaaaatagtagatttgatgtaagttagcaagattccaagaagttaacaaaccctgtatagatttcttacttgaaattcaaccactcatattttttaatgaatcccactctattgtatgtcattctaaagaaatgaaatatttgcaagagaaaagtaatatggttggtgttttatatataaagttacaaaaataattattcactcttagtagatgaatatgtgcatatttacacacatgcatgcatgtgacattctttccaaccgatctgtcatttttgttactgaccttggatacaacgtaagagattgtattgctgcctatggaaggggctgtttttgttaataacaaggatgatcaaacatatacagtgtagatactgaagtgatactaagcagctttgttgggagttcggtgtttggttgttaagaacatgatgcatgtgaagtagattttgataattaaaaggagcctggggcttttcatagtggagcgaaatctcatggaacagcagtgaaagctttcaaatcacatggaacattgagaactggaacctgaaagtgtagctagggaagaatgaagcaatggaaaaagggcgataaggagagcatgatggagctagatttcaaatgaccagtttcttcacattcttctgtcatctggacaaataaaagtctttgcattcatcagatgtctgcctctaccagctgtcagaccttatcattgcattggaaaatggcagccaaaggaggggacaagagaatggatcttaatcagagccacagtcttctctgaatggcttaaaggtaatctctaaacccaggggtaatcctaagtatattttctcccaaataccatattggaaagattgatgacttattcctgattactttatgggtttgtatttgtaatagctcttcagttaagcttttaaacatggctattcagagaagtgtgagttgtgtgtaaaaacaaaaacaaaaataaacatagctgtttaccagcattgggttagccttactcagaagagtgggaagtaccaggtgaatggttgctttcaaccgattgagaaagtgaagctgtctcaccagaacaccctcatcttttcccttactcccataaatctctgtgtgcctgcatccattcttgtttctttccattaagtctcagatgaggtattcatgcctttctctgaaacttaatgccattctgtttcactctttccatttgctgggactttgctcctgtccttttctctttttgtctcgcaactagcttagtggacctctttcctcttgttcagatatacagctcttcccatcttaaaaacagaagacgaacactttctttcaattcagttgccctcttggctaccacgctttctctgttctcatttctgctgccaaacttactgactccatgggtgctacatgctgtccctgcttccttgatacctctgccatttgggaagttcccctggacaggctctcatatacataacttcatccatatttgctgctttggaggattactagtgttttcttttcatgcttgaagtttttttctcagtccacatcctcctcttcttttccgtatttaacataggtttctatcccacttgttaaaactcccttcctttagtttatgatacctccccacccagtggtattctgttttgtttttttttttttaatctactggttagtctctattcctctctgcacagcattttgcctagtgctcttttggaaaaacaagattctaaggcgctttaagtattctgaaatgtagccattaagatgattttaagtctctgtcatcaacttcaacttttttttcttttccttcttcttttttttgagatggggtcttgatctgtcatccaggctggagtgcagtggcacaatcatagctcactgcagccttgacctcccggtcacaaatgatcttccgacctcagcctcccaaggagctgggaccacagatgtaccacacctggctaatttttttttttttttttttaatttagagatggggtgtcactctgttgtccaagctggtctcaagccctgggctcaagcagacctcccatcctggcctcccagagcactgagattacaggtgtgacccactgcacctggccagcttcaactccttgttctgtttgtccatcatcttgctctgtttgtctatacagtcgctttaaattcagcgtattccatcttccacttgtgtattatgtatttattcattttatttattcaacaaacactggatcttcttaggcaagtagtgtacacttgaaaagaatgtgttctgtagttaatgggtatagtgttctataaatatcacttaggtcaagaaatggtgatgttcaaatcttgtgtgtgcatattgatttatttcattaatttgatcacttaatgaaagagaggtattcaaatatccagctatttttgttaatttgtctattctggttattccattggtttctactttgtgtgttttgaaagtctattattaggcatatatgcattaaatattattatattgatccttccgtctttatgaaaatgtgctacctatgtgttattacccctgtcttgtagtctaatttgttttctatcaatatagccactcctgctttcttacacttactatttgcatagtataccttttactattctttacttatttttatcgatttatgtctttatatttaaagggcatctcttgtagacagcatatagtagggtcttgcttttgtatttaggctatcgtctgctttttaattggtgtgtaaattgatatggttggatttaggtctcccattttgctcttcattttctatttgtgctgtgtgcttttggttactttcatactcctttcctgcttccttgcattaaaaaaatttttttttagtatgtattccattttagtttcttttctggctctttaagttatactcctttgcattatttttttagtggttgctctagaggttacaatatagtcttgatatttattatagttcatttagaattactattgtatcacttcatgtaaaatgtaggaaactttcaatggtgtggtttcattcaccccccacttctttttttttttttttttttttgagaaaaagtcttgctctgtggcccaggagggagtgcactggcacaatctcagctcactacaacctctgcctctccagttcaagtgattcttgtgcctcagcctcccgagtagctgggactacaggtgtgcgtcaccatgcctgtctaatttttttatttttagtagagatggggtgtcaccatgttggtcaggctggtctcgaactcctgacctcagttgatctgcctgcctcagcctcccaaaatgctggaattacaggcatgagccaccacgcccggcccaccttcacttctttgtgctattgctttcatatatattgcatctacatacgttagaaatcccatagtggttttatacacacacacacacacgtttttgttttaataatatattttttgaagtgattaagagaagaaaataactatatatagaatgtgatgtttacccacatagttaacatttccagaattcctaatccctttctccagtttccatttgatgtcatttatttttagtttaaaggacttcttttagcatatcttgcagtacaggtcagctggaaaaaagtcctgtttttatctatctgaacttttttttgcccacttttgttataaagtcattttttggtgtaattactaagtttttgaagacatattgtgagactccatgaaatctcattttttaatctacctttatttcatcagttataatatctattgatgattcttgcttgaattaattatgctgtgatggctaccaaataactgttttctaaatttttcattccttctacatttattagtttatattctattggaaggaataggtttctcatctccccatttatttattcaaatcagtgcggaaacagtcagctcctattttatccaatgagttgtatgtaatctgttattatcattatttctttttcaatctcaaaatgttccaaaattggccagtgacagcatcttcaatctaacttcctgtgtccttttttttttggagatggagtctcgctctgtggcccaggctggagtgcagtggtgcgatcttggctcactgcaagctctgcctcctgggttcacgccattctcctgcctcagcctgccgagtagctgggactacaggcgcccaccatcatgcccagctaatttttctgtatttttagcagagacgggatttcactgtgttagccagggtggtctcgatctcctgaccttgtgatccgcccacctcggcctcccaaagtgctgggattacaggcgtgagccactgcgcctggcctactgtgtccttttaacatattccccttattctttgaaaatgtctttattttctggcacaatataatgttccagacttattttgttcttccatgtccccagctctagaatcgggtatttcttaaaggaaccctggttcttttagtgaagggtcttatttagaatccatttctggaccttctcagaagatttagctagggaatccatagatacacacccacacatttacacctgtgtttattttttatatgttcgtgtatttggcaacacgatcttgccctttcaccctggctggagtgcagtggcacaatcacggctcactgcagctttgacctcctgggctcaaggaatcctcctacctcagcctcctgagcagctgggactactctgcgtgccaccacgcccaactaatctttttgtattttttgtagagatggggtttcccaatgttgcctaggctagtctcaaactcctgggcacaagcgatccacctgcctcagcctcccaaagtgctgggattgcaggcatgagccaccatgcctggcctatattttctatatattgaaaatgacaagttcacactaatatgttctctatgttctttgatctgcaggtttgtacttttaatcgaaaactttggtcattatgtcttccaatatttttctgctccccccacctgctttttgtgggacgccaattcgatgttagaccgcttgatattttcttacacatcactgacacacctttcaatttttatttttagtcttttcctttctgtccttaccttggataatttttactgctgtgtttccatgttcagtggtctttttttctgtcatgtctgtactgcttttaatctcatccaaggtgttcttaatttcagatgctggtatttttcagctttagattctcccccttaaatgtctttgatctctctgcttatcatgcttatgttttcctctactttttgaacgtatgagtacttcaattttattttaattttatttttaagagggagtttcgcccttgtcgcccaggctggagtgcaatggcacgatgtcagctcactgcaacctctgcctctagggttcaagcaattctcatgccttagtctcctgagtagctgggatttcagccacccgccaccatgcccagctaatttctgtacttttagtagagacggggtttcgccatgttggccaggctggtcttgaactcctgacctcaggtgatccacctgcctcggcttcctaaagtgctgggagtagagtgcatttcttttaaaatttacttactaaatttttttttccttttagagacaggatctcgctctgttgcccaggctagagtgcagtggcaccaccgtggctcactgcagcctcaacccccctgggctcaagcaaaccgcctgcttcagtccaccaaattgttgggattacaggcatgcaccaccacacctggcctggatttcattttattcctttaaggataccagactttattctggcatatacatatggttaagttacttgtagtcatttggacccttcccatgttttcttttaaataccgttggggctcatctagtgcagtctttgcctagtttaatttcatctcactactaaggtgaaatccttctgagtactctacctgttgccttatgtattatgaagtctctccactgtggctaatgggaacatgagctcttcagaaaatatttggcctactgcttctctctagttttctccagtctctggaatttcaccttacaaatttacagatgatgttttcagagatttaagggtaccctgtgcagatctcaaggctgcccccttctctcccatattctgttgtgtaaatcctacccactttagtttctgcaaactttgctctctctctaactcagtgaggctgctgggctttttttgatgtccattctgctatggactgaatgattatgtctccccccaattcacaggttgaaattgtaatccccaatatgctgtattaggagatggggccttgggaagtgatttgatcatgagggtggagccctcatgtcatgggagtcacgcccttacaagaagagaggggagagaggttccttcttccttctgttcttagccatgtgaggacacaaggagaagacagccatttgcaaaccaggaagagtgccctcaccaaatatccaatgtgctagcacctaaatcttgtacttcccagcctccagaactgtgagaaataaatgtatgttgtttaagccatccagtttatggtattcttgttgtagcagcctgtaccgaccaagacacctccctggtctgcctcttggaaactgcctttaggtaataagctgggaaaatggtagggcttgttttccttctttcagggatcaaagtcctgtgctgcctgttatacagtatcggaaatgagtgtttcatatatttttgtctggttttctagttgtttattattgcataatagcagttaatccttcatgtgcagaggcagaaatccttaaaaaaatgctttttaatccatatttttctgtccgataccagtttttccattttacttataagaccctcctgccagcagcctttaattggtcattcatttctgcaacatattgataagcacctgctaagtgcctgatgtggtcagacagtgcaggtacaaaaaatagaagacatagttgctgccctttaggaccttattgttttgtgagcaatttagacaggtaagtattcacaataatatcatattagtaacactggccacatgtcccaaagagtagataaacatggaggagataattattaatttggcctgggaatttggggcaggcttcctagaggaagtagaattcagctgagctttgagggatgaatagcaggtagctacatagagaaggcagggttgcagagagtattcttttttttttttttttttttttttttttgagacggagtctcgctctgtcgcccaggcttgagtgcagtggtgcaatctcggctcactgcaagctctgcctcccgggttcacgccattctcctgccttagcctcccgagtagctgggactacaggtgcccgccaccacgtctggctaattttttttttgtatttttagtagagatggggtttcactgtgttagccaggatggtctcgatctcctgacctcgtgatccgcccgcctcagcctcccaaagtgctgggattgcaggtgtgagccaccgcacccggccaagggtattcttagtttaaaagtcttctatatatattttaaaacatatttaaaagatgctggccagtcacagtggctcatgcttctaattccagcactttgggaggccgaggtgggaggattacttgagcccagaagtttgagaccagcctgaacaacatggtgagaccctgtctgtactacagaaaaaaaaaaaaaagtttatctaggtgtggtggtgtgcacctgtactcccagctacttgggaggctgaagtgggaggatcacttgaccctgggaggtcgagcggtgttcatagcgctgtactccagcctgggtggcagaatgagaccctgtctcaaataaaataaaataaaataaaagatgccaaaaagaattc

SEQ ID NO: 19 - DNA, 130733 bp, Homo sapiens
aagcttttatttcactagcttctacctggaccacccatcaaaaatctttaaaacgagtattccttgggacaaggccaggtgtcattgagagtccccaggaagagcataggagtcctggtctgggagggccggacctacactctcgggggtgcccagaggaagaacagggcctttaaagtcaccctatgttctctgacccgtgcagtggtggcatactccctcccccacccctgacctgagggtgctgtgtgtcagctctcctaactcttggtctcattagggaagctggttgtcaagtactgcccagttacagttggtttaaactctcaactaagggatcgtaagcaggtcagctgcctgagtctccagttactcttgcagctcaggtttccccttgacaggtcctgataggggctacttttgcaccattgatgtggccagggcttacagcaaggtttaaggtttccatgcgcagccttcttggcaggcagctcccagagaaaggagtatggtttgggagaaagctgcaaggcctgttcgtggatccttagtattttgagccgatcacgtggagtgggcctgtgcccatcagtaccaggagactttatacttaggggagaatctgtatgcggtgtgattttcaagggtctatttcctcattgtttctctttgcttgccctatggctgagtattaaatgaacattgaaagtctactatatgccggttactctgctagatactagcagagatggagggtaggatacaaagacaagtaaggcctagtcttcaggaagcctttatttgtgctctgtgtatcagaagagggttgagttggtgacaagaataaagagttgaggggagtgaggggctgaaaaataataagccttagagaactaggaataaagtgttaacttgggaaaattgttgaaacagttccttaagatatttgtagtagatatgtctctagataagaggcttgtctggctgtgaggtccttgcacgagacccttgcaggtttcccaaatctatttggactgggtgtcctgtattaacatgaaatcgtaggcagacactgaataaatcgcaacagagtttcggttgtggctgctccagtgtcttggagtggttgctccagacacataggtcttatcctcctgccctgaggttctccaaatttgcatttgggaagtgtatagttttatgactgtttcttttatcgtgaacttacggccaccccacttccctgcccacttccccatcagcttcaccttgggtcgcggcacatctgttctccagaacatgttccctgccaggaatctgcagggagctcttaagacttatctttctttttagctgttttttttttttttccactcaacttctaggctagtgctgagtacttatatgtcatgctgtgaatatgtgtgtgaatggattggtcagaattccaaattttagttgtaagaaaattcttttgtgcagcgtgcatggctcaaaatgagagaaaagacactgacgaggacttggcagccccgagcttttccttgggatgttatttgctttaataaattttgacctattttgtaacagaccaggttggagttccctttttaacctgctgtttcaacaaagttaagtgcattgaaggtctatctcaaaggcaatatatattttaaaaatttcagaatcctattctgaggctgaattatggctttttcttttcccataggatttacatgtacactcatctgtattacttcagatgttgctgctgtagtttggatgtttctctccccaaacctcatgttgagacctgatctccagtgttggaggtggggcctaatgcaaggtgtgtgggtcatggaagtggatccctcttgagtagattgctgccctccctgtggtggggtgagtgagttctcgctctgttagttctcacagaagcagattgctaaaaagagcctggtacctccccctgcctctctcttgcttcctctcttgccacgtgatctctgcacacgccggctcgcctcactttccgccacgagtggaagcagcctgaggtcctcaccagaagcagatgctagggccatgcttcctgtagcgcctgtagaactgtaagccaaatgaacctcttttctttatgaattccccagcctcagatattccttcctagcagtacaacatgactaagacagttaacttcccatctgactccctccagttgcttcaagggtaggcaagaattgtatattagctatttctacatccagctgtgtatccacagtgcctcttatatttggcctatagtacatactaaagaaatgtttatgtactctagaaatgtactcaagaaatgaccaaatgaatggataacttggctcatgagaattcttaagggcatttgaaatggcaaggggtatgtttggaagaaggagtgtgaggagctgaaggaaaagaggggagaccagctgtgttcagaacccacagtcatttcctcaggaaacagtaccagatatccttggatgtggggaaatgatccactcttgcagtagcctaggccacaggtaattttgtgtacccactatgcacttagctcatacagtaggtcgtaaaaatgaaaatggcatgattccttcataatctaggtggggagacactataaatacacaaataatttaaaagtacagggctgagcaccgtagctcacacctgtaatcccagcacttcgggagggcaaggcaggaggatcgcttgcccccaggagttcaagaccagcctggacaacatagtgaaacttcatccctagaaaaaacaattagccagctgtggggcatgcctagagtcccagctacttgggaggctgaggtgggaggattgcttgagcccaggagttcaaggctgcagtgagccgtgatcacaccactgcactccagcctgggtgacagagccagaccctgtcttaaaagaaaagtacagattatttcaggattaagcatatgagtacttaggctagagagaggcagagaaatgactcctgttttccagccactgtcacactgcagtgtaagccatcgacacacacatacacttcacttcatctgcacagcctttcaagataggtgtttttatctccagtttacaggtgaggaaaccgagctttgggaccaagttacttgtgcaaatcacacagctgggaaatatcattgccaggatttgaatctgagtctgcagcaattcagagaaagggcacgcacagtggcttttgtgtcagggaagagacattgtctgtattgtgggggtaggtgaactacggctggaacaccagcatgcagaggacttgccttttagctctgaggaggtcgcctgcccttgcatatctataaacaaccaccctggattgagagctgttgaatggggagtttgtctgactcccagaagagagcacagtacaggagaaaccttatataacgcagacatgcccggcatcccgcaggcgggcgcaagccaaccgcacacctcacagacccagcttttgttgtgtaggcgctgtggtgtaaaaaccatcctttagggccctctccctcgtggtggcagcgtgcctgggagctttctgttctatttgtggtatctgttccctttgatcattgtgcattgctttgttcctcatctccctctttggtgtcacctgtgaagtcactggagagccataatcatcctaaagaaagactcagagaagaagaagtaagacctaagaaaacagaccctttagcctccttggagctggttttctagttaagaggcttgattaaaagcgtggggggaatggatctgtgacgtacatggtcatgaaaagtgcagccagcgttacagcacacgtctgtataggttgcatcacaggcagggaagaggcctaagggcctggtggcccgcaggtgtgagcccctctggtggctccatgacaggagaccccgcggagaaagtagctcctcttccttttttaaatttttttttatttttattttttactttgagacggagtctctctttgttgcccaggctggagtgcagtggtgcgatctcagctcactccaccctctacctcccgggctcaagcagttctcctgcctcagcctcccgagtagctgggattacagacacgcgccaccacgcctggctaatttttaaaattttagtagagacggggtttcaccatgttggccaggcggttctcgaactcctgacctcaagtgatctgcccgcctcggtcttccaaagtgctgggattataggcatgagccaccgctccccggcctccccttcttataacacttgaggcctgtgcttcagttcatgggccttatgtaaaggcttctgtcacctgtctactccttcttcaagctggctgtttattcggcacagaggagtaaattacaggtggattatgcagtgacaagcacttttatacctcctgtaagaacagtttataccaggggtccccaacccccagaccgcagactagtactgtccgtggccttttaggaactgggccgcacagcaggaggtgagtggcgggcaagtgagcattaccacctgagctccgcctcctgtcagatcagtggcagcattagattctcgtaagagcacgaaccctgttgtgaatgacacatgtgagggatctaggttgtgtgcttcttatgagaatctaatgataaatgtcatgtgcttgaatcatcctgaaagcatccctctgcccccagtccgtggaaaaatgttcttccaccaaaccagtccctggtgccaaaaaggttgaggactgcttgtctatgccttaaaaaaaaaaggtccatttactttgcagtcatagaggacgcagggctggacttgaggaaatctacctagaaatccccttcaggttaagatttatgacattagcttcactattgaattggatcatagacatctataattaaaggaaaccatttacactttattgttcattaaatgtttaaaccacctgaaaagatttttttctaattgagcctttttgcatagttaccagttacccgtatctgacttcaagtctttagccgtatacctacatggttccatagttatcaatgtttatttacaatttaatattcttctttagcattatttaatatcaaaatgataatatgtactacggtaggttgggctttacagcttacaaaacactttgacatacattctctattatttttgatggctctgtgacatactgaactgaagcaacagtttaaggctatttctaaattgggctctgctcaagtgtgagaaagcgtgacagtcaacatgaactagctttagccttatcaccgtttcctgctcaggcaggtaagatctgctgaaggaaggaaccgttgccaactggccaggtgtgccagttcgtggcctagaaggggcagctgtcagttgaactttgcccatgttttcaggattttatctcaactcctgagtagtctcatctgggtgggagcactagaattgaaggcctgttcaaaggttttgtgcctttaactggagaattttttggaagccccttagaactgccaggcagccatgtgggatcaggtgggggggactgggctgctgtgtggtagatttgagttcatgtctcataaatggactctccccgaatctgagagggttgctccctaagtcaactacttaataattaatggaaaggagatgtgacaggaatagccaatttccctgtcctgtttggtatgactgttggcaatttgatgattccttccttaaccttgaagcaatctcagtttgactgactcatactatggggaagatagtggcctttgaactcttgactcaatacagtcttgaccttggttagatactaccttgacctctggataaaactgtactgggcattactattttattgattgttctctcaacaaaacaaccgtatctttaaaaaatttttttatcttacatgtctgaagtagaaggtcacctcttttgtagtgaaaaaataactattttccccatggtgtgctgaatgcatgggttaaagcaggtagaccagctgtcctgggttttatccctatgtgttttttgctgattcacaaaggcatttaatttctctctaccacgctttctaggtctgcaaaatagaaaggggagttcatgaccatctatgcgttactgggggatttttctgtgcaagcgaaaattattgatgcaaccagaggacttgctgccagcgtcgaggggtgcattttactccctctgtaaagaggccagcagtaatgatagaaacacagtgcatttgactctgaccttatatttgacaactcttcctctacaatccttaaaaaacatgcctcaccatttaagagaccagcagcaggccttcagcaaagcccacggtctaggcagcctttgtaggcctctgggattgtggtgagaaaaccttatccctctcttatttcctgataactttacattttagaggtgtctggaaagaaaggtggcagaaaagcagcataacctgcttgacaagtcctgtacaaacagaagtccaatgaggctgctgctctggggttgccaagctcaaggaagccaattgtagtgtgcacaaaggtgcaagtcaccaaggcctcagagagctccaaggaagcctgtgcaaaggcaggatttagagttctaaggacgggttgtccagcgcagcccagcagagaacctaggtccataactgtggactctcctgtgagggagccatgttgcggggtggacatctgacagttgtccctgctctgtgaacctgcgacttcatcctacaggtgcagagaatggttttggcaactctctccaccgcagaatgtgggcggacttctgagctgggtttgattttcctcttttgctttggagtgtacaacaatcaaccctttagagcagaagtagaggaatggaagactttcccatggcccaagacccctcagtgggttgctgtttgctcttccctagaatattataatgttcaatttatgcctccaggagaccagagacacacgtttcccaaatgtgggtacaggtggctttaagctgtttctgtgagtagaggcccagtgacatgttccccagtgtaaccccctccttggtttcacatcccctctacccgattctaggccaagcccctccagtgtagttggtgacccagaacaggtgaaagtgaggctgccttttgtagcactgctctttgtgaatgggaagtgctgctggggagaaatgattttaagtgtgagctttgctgttaggggcagccctctttctccactgcaataagaagagtcatgactaagtctagaaaggcaggttttgatctttaggatactgtgatgtatgaaataaaggtatgtccttcttattcggtgttgcattgtcagcacctaacacagtgtttaattaaagcaaaaatttttgtattgaaaatataactaggtggaggagtaagtcagtgctacttaagtgtgagtatttgtcttccctgatcagatggttttctacgtactcaaaatttcatgtagtaagaatgcaggatgcttatggagaaaagtgagtgttgtttgtttctccttaatatttatatataaaagcaagagcttattaaacttttagacgtctttggaggtttgaaatttcccactgttattcttaagaagagaagagaaagaataattttttttcttctgtcttattggcctttaaggaaaagcgaatttcagaaaaacatgggacggaacaggaagtgtttacaggtttagtcatacttgttaggtatgaaaaagccccactgccttctcatattgtttcttttatgaacttaacacttcctactttgagaataccttcctccccaagggctcaaagcccttcatagtcattaatttgcatcttgctaattttcttaaaaaattaaaatgttaactaccatttagctggtattctaccagctaaaacttccagctaaatgcattttgtctgtctgtatgtattagctcagttgaaaatgtgatcctactgaaggcagtagggtaaccggcttgtcccagtttccctgggatttcagttttagtactgaaaaccccacatccccggaaccccttcagtcccagacaaaccagcatggttgggtcacccaagaaggcgaccagttcaggtagctctgcataaagagaagatgttccaccctgcagtccttaccttaaatctaggcagctaccttaagaattgacctagacagcagtgtgtgcatggctcagtgcaaatctttagcatcacctggtagaagacaacactgagcacacagtcgcagaactagtgcagttcgaggtacgtggaaatgtctctgcaaagtaatatttctggtttcttgtttttttgtctacccttttcccctttactgcactatatggtgaaaaacgaaaacaagaactgctaactacctgatttccgaaacaagaagtgtgatctcaaatatttctgttgatctcaggtttttcatctgaaaaatgaggatgctggtctcaatttctaaggccccttcctgcccaaacttaccaggaggaaagaagctggaagtagaaagcaggagaggttcaaaaagaaaatgggatgcatctcctttagtaagctctactctggagaaggacgttgtccttcaagtacaaaccttttcaccgacttggggagtttccccccattgtatcccaccccatctttttctgccatcgtgcactgtgtcgtttgaatgtgctgctttgtcagggctgggggcttccttggtgctccagcttggccacatccgacacacagaccaccccgtcctccttctgcctctagaggaccaagaacaacccttgttctgaaagcaccctgtccctgagcctgaacacatgaccctggatgtcagaagatgctcttctccatttcaattgcccaattccagctctgtaatcattatgttaaatgatacaagtttcaaaaaatatatatttctaatagactttctattatcttccttaaatccacagtgtcactttcattcttactcctcattttggggtgaaagtgtagaaagattgtggctttagaatctgacgtactttgcttcaaattctagcaccactgtgtgacattgggaagcccgttctttaaccccactcagactctgtttctccattgatgaaatagaaacatacagtatcttatgtgtctggcacatggaaggtactcagcatattaatattaaccactttgggctgggcgcagtggctcacgcctgtaattgcagcactttgggaggccaaagcaggcggatcatgaggtcaggagattgagactatcctggttaacacagtgaaaccctgtctctactaaaaatacaaaaatttagccaggcatggtggcaggtgcctgtagtcccagctgctcgggaggctgaggcaggagaatggcgtgaatccgggaggcagagcttgcagtgagccgagatcgcaccactgcagtgcagcctgggagacagagcgagactccatctcaaaaaaaaaaaaaaaaaaaaaaaaattaaccacttcattcttcttagcccttcaagcccccgcaccgtgttttctgacatatcatcttgttttcatcctttctcttcggtttaattccagagggtacagagaaggtgtaagttacaggtaaaggagagtaagtgcactgtgagtgggtgctgatgaaatatcacaacaggttctcattctgacaactcacactaggccatgcttccccggaatatttatggaactaagtggaaaaaaggatctttagcaaggatccagcaccctcaatgcagggaatgaaatgtgtttattattagagcaatccagtttccatacagctaccaatatacacacacccacataccctgttcagccatactgaagagtttacttgtaaatccaggcgaagctgatgctgagaggtggcccgctgtactgattttgtaaaaccagcaggaaaacctctgctcggccgaccacttgatgttttagttgcagccactaacatgttaatcaaaagaagcaaatacatgtttttcccttgagaaaacatggatagtggtgtaacggaaattaccttgaattattcctcctcaagtatctatccaatctagatagatggattatctgattgcaccaggagatgcagacctggcagtggctacttctattgcagcatctttaaaggaatcagatctttggatttccattttcccatttttattcttattttctccctgctaaaaaacagtttgcagaggcacttgaaagtgatataaactccatagtagataatagttgtacatgaacatcgtatcttttatcatatagtcccctatgtaattaggtgatagcttgagcctagcacaggtggcgctgctgagccatctcggaaatgaccacatctgaactgggcgcagtggttcatgcctgtaatccccacacttcgggaggccaagatgggtggattgcttgagctcaggagttcgagaccagcctgggcaacatgacgaaacctcgtctctacaaaaaatataaaaattagctgtgtgtggtggtgctcacctgtggtcccagctacctggggggctgagatgagcaaaaaaaaaaaagaaaaaaaaaaaaagaagaagaagaaattaccatatctgtatgtctatacataggtatgtggatttatcacagtgctggtacaagtacttttgtcattgatgtttattaagctttttatgctccaggcactatgcaaaattgtagggcattatctcctctaatcctcagaatcttatgcagtagggccggtgttgctattactccattttatagatgaggaaacttaggcttggggtgtttaagtaacttctatgaagtcacacagtaagtgctagagccaagaggcaaagtaagcctggatgcttccaagccgtagctcttaaccactatgctatactgctcaaaaatatttttagaactgaatgaagacatctaaggaaaaggaaaacgtggtccctaatggtcttttgtgataacaatatgaaacctttcgtctctaaagtgtcatggaagtgaaacttgaaaggctctgttcttcatcttctacttattaatgggcaaaatgtcttcgtaatttatggcatgtgtcccaaaggtgcaaaggtggcaaggtggccttttttttttttttttttttttttttactaatactaggtcctgcttccaagcctcctatttcttcacttccctgtgtaccagggtttacctgctgcttaacccacccaccccactatacgtgtctgtagtagacccaccaacattcacatggccacttctgctgaaagtacctcccaggatagaatagggtcacagacccccaattgtataagcctttggcttcttgatgtctctgcgagttacggttatgggagttggtctttggtgagattagtggtgagatcagtgggtggcacctagggtgatttattgaatagtatggggtgaggctgaagagcaaacatccacgtaagtgttgtctgttttggagtttgaaaagttgtcaccctaataaacaaactacttaattgaacagcccttgcttggcgtgatcaaagaaaagacctagactttgctatcagtaggctctgggttccaggcctggcttgtcacttacgatgatgatgatgatgatgattttttatttttttgagatggagtttcactcttgttgcccaggctggagtgcaatggcacaatctcggctcgccacaacctccgcctcccgggttcaagcgattctcgtctcagcctcttgagtagctgggattacaggcgcccgccagtacgcctggctaatttttggtatttttagtagaaacggggtttcaccatgttgcccagactggtctcgaactcctgacctcaggtgatccacccgccttggcctcccaaagtgcggggattacaggcgtgaaccatcgcgcccggccagctcgtcgcttattatgcaagttgtataacattgctgaatcccaagtttttagtctttaaaatgagaatttaaatgtcgcccttattttgattgctgggaagtttaaatgaaacagtgtatgtgcctgtcacatagtagttgacaataaatgatagtttcttttccttttcccttaagtaagttttttttccctctagcctataagctccttaaagaagatagagattttcttttctcactcatttccatattctcagcccttagcagtgccaggcacatatttgctgaatgaaagaaaaatcttttacaaaggtcttcagatcattcattcaccagacaattgttgagtatctacagtgtatcaggcactgttcttggagcagggcagtcttaaaaaacacacacaaacatagtctgtgtccccttttttagtctaactgggagagaaacattacatagataattagagcaatgaacaactttgatccttgagatgggatttaaattttaagagataggtgacatttggtgtcaagtctgtccaggtatacttgatattgtttttgatcaggtacaagaaacggcaatatactgttatctataactggttctgaaagatctgaaagaggtgtttctaaagtatttttgaggaatggtgctgcttttttggaataagtataaatacattgtaaagtatctatttcgagagggaacagacttgatgggatgggatcatagtaggtaaggtgttccaggaacttggaacatactggaataaggcttaaacacaagtcacagaactgggtgatagggcggtgagcgcatctactggagaggagatggggcagggctggcagcttgtagcaagatttttatgtagacagttagacttcaaacttcatcagtaagtcagtagatggccctaggtggaaacacaggacaaaagatgaatttgtgttggcactagaaatactttgagctcatctaatgaggctcattcattcatttggtaaatacttcacgagtgtccagtgcaagctctgttctagttgtaagggatatggcagtgaacaaggcagacaaggtccctgtgcctgcagagttttgatgataaccttcccccctgggtgtgtgggagggcctggggctcctgtgtggtttgggggtctgagaggtggatgaaggtacagtaggcccacagtcgtggaaatcaaagtccaagctccagtgaaccatcaattaagaaacaagggattgtgaagaacaagacctagatccagactgaagggaaggatttgctgaggagttcaggccagcatgggctggggtgacttggcctggaactctacaacagtcaggacagggagtcctgaataggggcacctgcagctgagtccatggatggggagggacctgtgtaaggcactgaatttagactctgcacgcagttctaagaggtgttctcaacacgtttatgcaactaaaaagtgtttattaacagtgttttgaaacaagtgggatttttgttgaggttgtaggataattcagggtcatatggagatttttattctatcagtatttgccctgtcatgtagatgagacacgttagaggcaagcctctgaaaattagattgatttatttttctagtctgaaccgaggaaaataactacttgtcttctatctcctggtgctctaatatatgtaaaatgttgtcttatggtgagacaatgcatattaattttttaggcacttgatggaagaagtggatgagggaagcagcatcggtctttgaacctaggtcagaaagaaatggaagccatggtgtgagaataatgcatcatggtttgtatggcctttttcatgtattttaactcaactgattttctcagggcctcatcagtcagtcaacgcagttttctccatctcatagccaaggagactgagactcagatctgcccctgcccactttttttgtagttttagggggaagcataaatgtggaggaagtaaatgagtgtgtttgttcaggcttagacttttgttattttttagccttgcagggaaggggaggaaagccaataacgatggctagaattggagatagaatgaatgcaagttgcattaaactgtaaggttagtctcggtaagaggttgtttatatggtggtgtcttgggtgtatcttaccatgtagcattcttcgttttaagaaggattccttccggtgcaacatcagtcacagcatagaaagcctatgctgctctgctagtttgcttgcttgcttgcttgcttgcttgctttctccttccttccttccttccttccctccctccctccttccctccttccctccttccttcctctctctttctctttctctctctctctgttttttgtttgtttttgctttttttttttttttttttttaaatttgagacagggtcttgctcagtcagccaggctggagtgcagtggcgcagtcatggctcaccagccttgcacttcttgggctcaagtgatcctcccacctcagcctcccaagtagctggaatgtaccaccatgcccgactaatttttaattttttttaatggagacggttttgccctgttgcccagactcatctcaaactcctgggctcaagtgatcctcctgcctctgcctcccaaagtgctgagattacaagtgtgacccactgcgcctctgccctgtgccacttttccacagctgctttacctacagcctgggagtcaggccagcaaatgacgacaccccaggcacagacatgctctctaggaacttcgagtcaggtatttcactttgtaaagaacttccattttaattctattttctcctagttagagactcatctttcttctgaggggtgcaaatgattctttggagaagtttaaacctgttttacggttcaaactcaagatggtagaaacaagtcatatccaaaagagtgccccgagctctaagagttgtggctgcgcaacgttttttaggtgtctccgaagtgttatggccaagttcaggattgacccagatgaggagaggttgcactgcatagtgatgatttgtgttggggaggagagctgaaactttgcaaagtggcgtcctgaaccaacttgtttttcagcttctagggaaatttgttaggtaatttttaaaaaaagagagagagagacagagaagacttaatttgatggagcctaaactccactgtcttctttctgctgagtgctaaggggctcatggtctctgaggacagagggcaggaaaacaccttcatgccctgtgtcctctgtaaggggcctctagtatgagggactctgatgactattgctgttggggaaaagaaggaaaaggaacaggggtcaacttctgtcatcatctctccagagtttatgatgtttctgaaaggatggggaatagtgcgtggcccccactcatccctgtgaggtgctgcccaggtatccaacctgcagtgcacatgctcgccactggcactggggatggtgagtgcagcagagagatgggattcttaatttattcaattttaattaaaaaacacagttcagttgttaaaaacctatttaagtgtgtttggaatagcttggatatgtgaatttaccttttcaactgtgaattttatgaactctaaatacagatcaagtatttccagcaaaaatttagtgtcggatttgaaatgtgctctaatggaaactagacaccagatttcgaagacttagtatgaaaaaaacataaaatacctcagtaattatctgtattgactatacattgaaagaatattttggccacattgagttaggtgtcctatgttatttagatgcattttacccatctcttgtttttcatgtagctaccagaaaatgttaaattacctatggggctccccttatatttctgtgggacagtgcgagtctagacagtgccttacgggatccatcagaagcattattggactttctagggaaagttgctggacttcaaaagttagagtcataatttttcccgttgtgttaacaagttgctttatgtggatgggtttatgacaattgagggttggaaaataggttttaataagagtaagttaattgagaggacagctttacctctgttaatcagaatgattttaaaatgcattttcacccactcagaaaccactgattctcatgggaacaaaaaactacattcgtgcgtagtacgaatttgtgcctgctgggtccttgtacctttacgccaggcagaaatctccgtaatcgtcagtgtagatttcatttccttgtggcaaggaatataaagtaatacaaccaaaggggaattccactgcatgaaaggaaatattagtgctcgtctagctcttgtttcaaccctataagctccaagtgattttcagagtccctccttcaacttttttgttaaactttccagattttcctatttatagatttcagttgttggcagctacatgttggaaccgttgttgaagcccctagtaagacttgatgctgtagcacgctttcacagcttggtttgcaagttgctttctaaagatgcaaagagaattactacccactctagtagtttgaacaacccagtgaatttcagatattaaagccatattcatgccactgttctcctaattctatcactgtttagaattgcattttgtctaaaggaaggatagatagaatactactaataatatcaagatgctcagaaactgttgagaattttttttacaggaagaacttaaatttccagaggcttttaaaaaaaaatttattaaggaaggagtaaataaatacgccgggttcttgagtaaactacttttacccttcagaaccactttgtacgtagactttatcatgatggccaagagtttttaaaatactataggcagagggtatactctagagaaagaagacaacattgggtttaggactgctagccccatccagagcagttatgtggttcattcagggatcttcttagcccttcaacctcaatttctacatctgtgaggtaggttttgtgctagttctagtgacatgactcgtgggtgtattaggaggatatagcagcatgtaattgaagggcttttatcttggaaaagccttagtaggctcaaggtttctagttgtttagggttctaagattttactaactagtcagctgcttggagttcaaggcatttcttcagattataatgagttgatagtgcagtgtgcaaaaataaagaccgaaccatggtaagtagcaaggttactgtaaggaaaaaaatgtgtcccactggcccctttaaaatggcacaggtgcatctctgtagcaaccttgacagccatcatgtgggatcattcccctcacccagggaacagtggttccccaatctccaatctctccattctccagcatgagaaagtggtctggagcttgatcacatgaagatggacagacacagccttttggatgcgagagagggaagggaatgcaggccaaaagtggggtgggttttcctttcctcttccttgttttttattaaccttgtcttgctcctgccacacacaagtgcagccagtgctcaggacactgctccgtgtggagctccggaaagtgaagctgagaagccttccttggggtggacatggggggagctgcagaggcaatagggagaaaataacaaccatggctcaggcactgcttggagcagttgttcatatgtaggtcaggtagtcatcattcaggaacttcctgtattacacaaataatctctattttatggttaaaggtaggacagtgataatttactcaggagggaaggacaattagcaaattgattaataaggtttctaaaacctattgtgaaagagaatcctttaacatatgtcttgatttattctgcttatttatgtcttgatttaagacagtgattcgcaactttagctctgcatattgcaatcacctgggagctttaacagcgttcatgcctggctcccatccctggagatttacttggctattgggattgtgttttaaagtttctccaggtgattctaatacacagataatagccagaatgcctgatttaaaatgtttcctgaattgttagctgatcttgagtgcatattttctatgtactgttgcacactaatagttttaatgaaggcacagaatcttatgtaaaataaactgttaattggtcttaactacagggctacaagagtttccttcttatttcaagctgcttaatattccgttaatcactgttgtcatgcacacacacttctgtattccattctcattcatttactttttagaatggtattaatgctggtggcatttgcagggtagtagtcaccttgtcagtagaacttgctttagtaattagttgtcagaaacaaaactccccagactttctacccatgaccacaatgaagggaatgatgccttttctgagtccctattcctaagaatcaggaaatttctatgatatttgacaagtataggtagaaattacttgccaaggtgattatgacttctggaaaaaatttttttaaaggaaacacaggtgtgtaacactcctaatcagtatataagattgtttgtatgttactttttcgagttataaaaggaagaggataaattctgcctccttccccagttactgtcaatcttcagtcttcttttgaattaagttagtttcccattttacaacataaagacaagtttaattcttaaggcttacataaaaaagtaatgtttaatttgggatttctcaaattcttcatcataataacaccttgcattagtagagaacctttgttgcaagaagatcaaaatattttataagcttcatctcatttttcttttctttctttcttttttttttttttttttggagacagcatcttgctctgtcgccctggctggagtgcagtagcacaatcacagctcactgtagcctcaacctcctgggctcaagtgatccttccacctcagcctcccaagtagctggaaccacaggcacatgccaccatgcctggctaatttttcatattttttgtagagacggggtttcgccatgttgcccaggctggtctcgaactactgagctcgagggatcctcttgccctggcctcccaaagtattgggattacaggtgtgagccactgcgccagacctcttttatctttgagataataccgtgtgacgacaaaggctgggtattgttatccgaatctctcacacagcaacactgaggagacattgactcatttcttttacgttgctttttaagtacagtattgtttggttttgttgaaaattattttggtagtaaacattttccagagatataaatcttttccagactcatttgcgcttgttactgtaggtagaattcatgaggcttttcctatttctgtttatttcggagcctgaagtgacccaggaattatgtgatatatgtagagcgagggaatttcttcagtttgactgtggtcctggttgtaacccagccttcttccttacagatgggggtgagggttggggtatcccttagagcctggtgtgtcttcatacaaacagctttgctggggctgcctagagcctgggccagcagtggggtagtatcaagtacagggcattattcagcggttctccacactctcctcatttgaatgagaatataaatcttctcccctggctctcatgtcacatctttaaaacctcaagtttcttattaggcatgtgtggtccatttaagctctagacatttcgaaaagataaatcacagggcaaaacatctttctagttttgaaggaggtctgagttgcagctcgctggggttgtgagtctgagccgtcgcttttctttctcttccttttacaagacttccaggatatagccgttaaagaaggacacaaaaaagagcaaagccctcagtgatgctgtggcacaaagaagaaagctacttgaggaggaggcgaagggtttacgaagaggcaaagaatgcaggtgaagggagggaggagttaatagttaaggctcaggttccaagccctttgggctgccagtgtctgcaggagccttgctttcatcctttccttctgcccaggttttaagtctcatgagttaaaacctggggaagctcccaccccaggtccactgtgagggaacgtacaagaacagtcacgtggcaatagtacatgcctggaaggtatctctcatttggggggagattgagaagcgctgtctaatggtgcccttgatacaactaaatagcaactgtctcagttcattacttgttagccccaggcagggacaacgcagattggctaattataatagccagaccattaaagggaatagcattaatggaggagaaagcagctaataaagagctgaacttggccactttgttgtgcccaggatacaagctgctgttaatttcagtacctgtttcttctgctgttagaactaggaagaaaggatttagtgaccctctttcaaaaggtggatcacaagcttagaggcattgctggataaattcaacagcaagactttatttcttccccagaggtgacgtctgatggttctgtataaataaagtcacaccacctttcttatgctgaattgatgctgctgacctgctgttagtaggacatgcacttttatggcgtttccaggagtggtgatgtgtgttgctgagctcatctaatctctgctttgagcaaaggcaatcctctatatcatggcagggattagaggtatagcctggggctgcagaatggtgtgatttaaattttcccatgcaggttcaaagcttgtaactttgcctgcgtgtacatccacactgggttccagccacatgaactgggccaccttcatagacctccctggtaaccacagcctgacgtgacaaggaatcacagttttactttccgcttactatccatgttagaaatatctaaggaaattcaggaaaaaaaaaaaagagagaatttcatggcatgtcaagaatggaaagtatcttaattaaaatgttttaaaatgggaacaataaagaagtcgatttaagttttttgctttggtgcttgtctttaaagaaattgctcctaattctagaaactagtgctttttctaattatattcagtagaaccctaggatcctgtgaggaggcataggggagtaattgataaagaaggggactgtggtgtccgtgttttatttggagctgttctacccacactgtaatttataagctctaacttaccaggggagataagattgtatagaaccagcatcttgcagttatacggaacctttaagttctcctactccagctccttcccagtgcaagcacgtgttttagagtaactgttcagcctcagcattaagtcagctttaggagaacagtaaatcgcccatttatctggagacttcagctgtttgaaaggccttccttctagtgcatcggtatctgttgctggctctgtcctctgctactacaagcaagccttgagtctctcttagacttgtccttcctatatttgaagacatctccgagaagattttaaatcttttttcccccacaggccacatatatccttaatgccttcatccattcccctcttgggaatgtgcatctttgggccattggagaggtcttgcttggactgcggccactgtgatttctgggggcagactcagctccttcttggtgtagagatctgcccactataggcaccaaatagatgttggcaggcttctttcctccttactgcttctatttatctcacctgtacttttagatttgctgctcttgggtaagcagataagaacaagggaaatgtcttccgttgttgttaaagacaatgttaggatagaaagtaatatgtttgtactcaaaaatgcccagtgagatttctagccacggccaagttatcatttgcataagcaacctggaaatgccctcttggtcctactgattgtgtcccatggttaatgtagatccctggataaattcgaatggctactcctgctcaggggtcatgccatgagaacttttctcatacatcagatagagtccccttccgtcagctgaatgcatttacccctcagtctgtgctacccataggataagcaacatgcataagaaggtaggtgccttggcttaggcagctctgttgagtcaccctcaagaatcctgctggaattctgtgaggagtgaggatgcagagcaacgaaatattcgaaggctgctatgatttttacaagcttgaacctgtctcttggaattccccattgtgaagtcattgttgactggttggcattataaagcagttcagagaagtaaagttagatcagtctgcacgcaaataccagccacaccatctcccaagctagtgactggaactgcggttttcaagtcagtttcctcattgcggaatggagataacgatgccttccttgcagggtcattgtgaggctgaaataaaataaaggcttcatgggaacacataccacatgctcacttaatgctagctctctttcctgattgtggcagtgactgtattttccagctacaattgtgacacgtgttctgagaggtgttaagtatttatatacaactacccatatgtatttatgggtaaaaggacacggaactttaaatattgagaccatcctggaaattctaggatgtatgattgcataatttgtaatgcctgctataggcctagcctcatagttgacccttgatggatgctgaaatatttcttaatcatagggagaaaaaaaactcaatgaccttttacagagatgtttgattgcagggcttattgctaatgctctctctctctctttttttttttttttttttttttaatctcactatgcaaagataatacaggtctgggtaagaggaagacttaagatgctttgacttaattgtatctgcttgacagaagcaatatactgccttctgattttaggatgtaaccatccagaaaggcagaagaaagggacaatttcagttctaaacaggaatccgaatatctcacgtcctgaaccatctacataaactagagaaagggcactccttaagactggtgaagcgggctccttggaagatccccacagcaacattgagtttggtttgtctggcgtaccctctccccaagggctgagtgggccatctgggtaacctagagaggagacttcagatgctaggagtatagttcctacccatcctcattttcacagggtacactcatttttttccccttggaagtactgatatgtattctgcaagatgaatgttgagacccaaacaccatttggcttgtaaaaattaatggcttagcatccagagggatgttgctttcagggcaggggggacactggacaccaagaagaaagccagcttgggcccctataccatcttggatgtctaaaccatcttctggtaactctctggatgaaaagaaatcatgaacttcacttctgtgatttggtggatgtggattttgctacatcaaaatttgcatttgagtctctgtggtgttctttctagccgagatgctagggtatgctctttctttctggggagattccaaaaatgttactctctgtggctgtgtgtacaatgtctatttagaaaagaagactggcatttgcatcttctctcaaattctttacgtttgtctcactgaattttggagtggacaaaatattcaatagcttttttcaagtgaaaaaaatgtcgactttcaagagtgtattactttaggttcttgtgtatatctgtgctttcctggtggcagaaacctagaaaactctagagctcaaatttcagcgtattcaattttttgttaatgtgtctatagcttgttaataaaagcttacttaatgaaagccaacatcaccaccacttgaaatttttgcagccagaagagtgtacttaaatacttgtgtattcagacttcactttaataaatttcaataaatagcttcccataggagaggtttcttctgttgaatctgtagaagttgacgacggtacaagcatcagctttctcaggcagcttttctaaacacctgcagggtggaaaagagatccttctctcaaaatactgaatattgctggcatgaccactcttgtcactggtgcctgctgttttccatcttatctgggttgcaggtttcttcacagtgatgggacaccgaagtgcaatgggatgaaagcatgcctgtggcatttttaccctagctgtggggaaatgaccactatcctgtgtccatgacactcttcctcctcaggactttcaaactaggcttcagaagccatcactgggggcagtcctggcatttataatggggatagggacaatttccaggaaaagtttctatatcaaggacatctcagttctgcagcagagaaatctttgaaattacctgcaaaccatctttttgcaagcacaaccaactttatttctgttttaattaattccaaaaatgctttatttccagaatgttaatatttagttagcagtaggctctaagtttcccaacccctcagccttttcagagggtataataataaatgtgtaaatgtgctaggggatccccgtgatttatggaagctttatattgaataattttgaagaggaaagaccttttggtaataatattcattttttgactcttctgtaatatgcaacctgagggtgggtgtgggggaacgtggagaaatgccattctcctactgagcacagactgtatacacctattttacagggaagtcacgggctcctaagcattcagtttaaaaatgagcagaattagatgggtacccttcattggcccttcatggctaggggagaaatgggagagggaacgcagctcattttggcttcagtccttacgctttcaagagacaaccctactccatacttcattattttttttaaagctttctataatggttggtgaaatttacatttcaactcttgcctacaacagttttctgccttattttctcttcccagcgctttgtgccgcctccttgacaacctgctcataggtattacaattggcctcagaaattgcagtgcttcccttttgttcagctggttggcttgataggttgtatctgcaaatttgagagcagcgtgttttattttttacagcatctaaacaataatgtaaccacatcacggcattctgagtcacatcattgacctccaccagcagtttatccccctacaacacttgaatacattaatatcactgtctgtagcattttaatttaattagagcagcggttataatcctcttgggaaaatcgttatcccccccatacacacacacacacacacacacacacacacacacacacacacacacacacacacacacacacccctactccccataatgttaaaagaaagaaagcagctctggttttcatctgtctgacaatttgctttagaggtgggactctcaccaccaccccctcctttgttggggtcgcaccagagaagcagttgtgagagtaaagaggttccctttatttgggaaattagacgttagtgtccttaaacttctctgtctagatgtctccatctgagatagtggtatttggttaatttttccaattgctgatagtctgctgatgtgccagggtagatgttaagtgcgaggttattgcaatagagtgaaaaatgagcactgtgagagtcaacctagagattcacaaaaagagagacaaaaggagtctctgtagtgtgggattcccaagagtgtgttttgttctccttggaacagagcccactcactgtacagcatccttttggggtccccaagtgctctgcagccaccaagcccagagttaccttaggtgtgccatggctactagaagagtgctcggggccctagaagcacattgtgcatttgtccgtcttggtcaaggtaacctctcttgttgctgacaagtctcttcattgagcctttgaaaaagagcttatggtgtggaaaactgtcctccagctgagtagaaaccatcatcaggaatgtgaggagatcagtgggccacagtctcttcatctctggccttccttttataagttttcatcatgaaatagcagttgtctccatctaaaattgtttggacggggtttgcgggggatggcgtcagatcccagagcaggtgcagaagtgtggtgtttcaccgtaaggtcagggaaccatgtagaagtgaaagcacaccaaggggttacttttaaagagagcacagttgaaaggaaggtccaaagcaatgataatttagtaaattacagtatatacactttcagggtaatagctagccagactcttttgtcagctggctggggatggagttcctaagaaatgaagtccagtcagcatggagggccgggtttctcccagcttgccttggtggagttggggcaggcggggatgaggcggcctcactctcatggactagccagagtgtcttgtgagtttctctttgcttcaagggaaagaagagtcattgaatttcgaaatgctgtcttgtttttttcttgcactcatgaagcaccatttgaagaccctttggctgcccgatgttttcttcaccaagtttcacttctgcaaaaaccctaacaaaacagaaagctatttccgagaataaagttaacggtagatatctagacatatagtgggatttggggggtgtcagacaagagttgaagagtatggagaatttgttaaattctaaaaacagactgtttgaaatgctcagaagcccacctcacctttaaaaacctctgaacagattttatgtttcctatatgtgtgggctttttttttttttttttttttttttgcttttttcatcccaaaccaaacaccaaaaagtataacccatccttcaagttaaagtttctcaaaatacatgtgatgcctgctaaagttcaagaaaagtgcagttgaaagttttgcctctgggtgactttttacaggacatcttaattgacccagaaatgaaacctgggatatatgtgcctgcccttcattaagaaattcaccaagaaacctcaggatgtatgtttaaacagaaatattccaactgccctacttgcttctggtgggtgccttagggaaggtatagcaattccattcggaaattataacaatatgtatatattcatttaaaatcaaaacttcctaccacaactgccagactttctaggctatgagcagaggagaagctttaatttggttataggccgaggactccgccgcttccctttgcacatttgatgagatgtaaaatgttaaagaactatctttccaaaacgtaaacactgccttccctttacttaaatgtacgattttcttttgctcttgagttttattttcatagtggcatcttactggtctttcctttccaccatatttttggatgttgtgtgttccattttacattgcccagttaaaccacagacactcctgaagtcatgtttacatgtggactgcaagtcaacctagttggcatgttgatctaagctacaaattgcactgctgttttgccgaacccaacagtcggtttcttgccattatttgcggtattttaacttaaaactcacggtaatccttctcaccccatctagtttgttttaattgatctaacaaacactgcttgtttgaattcaaatggaggatccatggaagctctcccaccccaccctttgatacttgataaggggtcaaacagtacttcttttaaattcagataattctttgaatgaactatgaaatacttcagagggaaaggaaatatcgattctgagatggagagtaaaagaacaaggagatattcattattgttgcagataattcctagcaatgaaggaaaaaattagacgttggatatttttggttgtggtggttgtatagtgagataggtggacaatagaaaaatcttccttgtggattgaagttctaaatctagaacttatctttgaagctgtcactttacttgatcagctcactatggaagtgaatctagaatcatactttgattagaagctggggatattgctacagaagagaaaacatggctttaatatagtgatggcattaattatgtgacttgggcaagtcattttttaaaaagttgtctttaagccattctcgcggacgtattttttttgttcccttttgtccctcctttttacttgtacaaaccacagggtgtacacctattgacatgagtccaaagtaaaggctgttttcaacgatggcagagttttgttatatagccccaaggctaggcatctgaaagacaactgtatacagtgtctctacggagagagtaagccggattgcttgggaagctggtactgcccatgccccgcctcccttttgctccccaccccgagatggtctcatacctccattccaagctttcattgtctctctccccctcccctcttcctgcccttatttttaacagcaggaacgaatttcatatacacctccagagagcccagtgccgagttacgcttcctcgacgccacttcatgttccagtgcctcgagcgctcaggatggaggaagactcgatccgcctgcctgcgcacctgcgtgagtgttcgtgacccgagagggacagaggattgatggcgtggggcgggggtggcaggcagtgggctccaggccagagaggggcaagctctgaggtggttttcacaggacttcgccacgctgctttggaatctttcacacccccctacccccagatacctttgaaaaatttgaggttcctgttccttgtttctcagtgtattcatttcttccctgactatgacatgttaaaaaaaaaagaaacctggaaacatgcagtatatggcagagccaactaaatctcctagtagacaagatgatttctgtgtgtgtgcaaagtttatctgtattctcaaattcacgcttactcaactttaatattttctttggtcctaaattttgctcagtttgtgagtcagactcacttctgctttgtttttaagctgtgcgctcgtcctttctttccagggccctccctcccctccctgtctgtgctggctacttttcttcccttcgttttctaggcctgcataggtcctctctcttgcctcctctttccttcacctccactctctcttgcttctcttgtgcttgctttgcctcagcagctgcagtctgtagtggttccacctttctctcccaaatcatctctaccccttggcctaccacttccccgtctcagtcctcagctgcaacttggcagaggtttggggcccacacacctgtgctgctgatactggcctccaaagccgttgacacctgctgtgtcctttttgtctgcctttctcatactgccacccagctcaggtgataaaacaggattggggcagctggagagactgaatcacctgattcccaccctcttcacagtgtccaagaaaatgccagcttctctgccttgaatgttatcctgagggcacaagactagcttatagaggacacttgaggtcaccttggcccttccagtgacttaaatggtggcacagtcttgctcaccatctctctccagcagggtgatgctctccagttcttctcctcctgttccaccctcctcagaaggttgctttctgaatgcagagaacaggagacagaggatgcaggttcttcctttctctctctggtaattcagggaatcagatgactgtgatatgggggctcctgggggaacactgccgccggcttatgccttctgccccagagggcagacggttgctgggatgtttgtgaggagttggaggcatgagaatcctttccctcctgcagcttgctgcgtccatcagtatttacgaagttgctgcctactatggtcaagacatttctgcttcatttgggcagggaagtaaaggacacagccctactctaccatcttttcctctacttttaaggaggttcgaactgtaaaggtgccagggtcatggctgggaacatcagtgttcttaggaaactggaatgttgtggcaccatgggagcagacacaactggaaaagaaacagcagccaagtgataggaaattttcctccagaagtcatcctgtgaccgatatattcacttcagaaatattcgcctcaggatggaacatactcatgccacacaggcagaacacttctgctacctaattcattcatttattcatctcacaaatagttattgattgcctctgctgtgcccggcactcttctgtgtcctgggggtgcagaaatgaacaaagcagaaaaaactcccctgctcttgtggaacttaaattctagcacagagaaaaaaaaagtatcaaacactcatcacaaacaggctgagatttctttcataacgttttattcctatagattgcaacatcccccaaggaggccctcgctcctggttcacttctggatgccttgacatatggaagctccttaactatcttccacgagatgttatcctgacaaaacaaataagaaagcaaacaaacacactgaactggaggtcaggagatcttaacttttagctagttctgctgttcgactgtgggtaatttaactcagttctcctagcatacaatactgtgtgttgacaagaaaatgtttaacagccttcctaactttaaagtactatgattctcatctgaggcatcattctccttgctttgaattgtttcttccatactaacacttgaattttttcttgagtagacagtttccttattgagccgtgtctgtgctgcttaccagcattttggtagtgccttctgtgtgcctagcacacaaccataatagctaatatttatcacgggattaccctgtagcaggcactgtgtgaagtcctttacaggaattcttttaattcattctcacaatacctgtcaggtaggtcttctttctatctccatgtcacacataagggcttagacaatttaagtaatttttcaaggtcgatcacagaaccagtaagagatagagtcaaggctcaaactcagttctggctgactccagagcctaggatcttatatccactataccaccaaaaagtgtgtgtttagtaaatatttattggatggatggatggatggatgaattcagggttgacacttagccagtgttcactggtgtggccgtagcattggtttatggctggaatctattctaattgctgttctgtctgttctatctgttgttgaatggcttgcatatcacccttcgaaggatggatgggtccccacgtagacagctataaaatatagaactgcagcacattcccggaaacctttccatttcatcagtagttagactatggattcagattatggtaatgattttgcctgaatgcctactctatggcagtctaactttatatacctctccttggtagtctgcatgagacctattgtgacaccattggttctgacatctgtattgaatcctctggaagtggaggttcccaggctcttgctgtttgccctcagctgggactttccaaatgaggctgagcttctgtcctcccgctcccgtttcagggttctgctgcttgtcatcctgtttgagaggagcatatagcccctacgatgactgaagctgtgccacacacttaaagatgcatcccagctgagtttccaaacctaaaagaaaataaatattctaaccagggaattgggttattgctgttttaatctgggattccagacaattcccagtggaatgctcatggaaagtacggggaagaatctcaaagccaagacaacagcgggacatttatggtattgctaagtccaaggcacttgtagctgcttattttaaagagatactcatcagattggtatgcctcaaagtgggttcttttcaccattttccattgattaccagataaatcctctcccttaattcttcctttctcttctttcattcttaaatcaacttatattcttgtggatgggggtaaagaggagcagagatcatattatttaaggttctcatacagagagtttctcaccattttattctgcaaacacagagctatacccaaactgaagacacagcatgacaaattagcaagttattgagaagtagagagtgatgccttttccttttatttgccagtgataaaagcaaagtgataaatggagtaaagtgttaagtgctgattagagaggacttgaaaaggactggcaaagaagcctgggcagagtgcaagaggagagcccagggaagaaaggccagaccgtgccatcctgctctgactcactgcccagattaccaggacagtgcccttcaacagtcctacagcagaacccctctgcttaccgggagagcaaacacaagtatgtttgttgagaggatagaaagggcatcattttttcttcttcttcctcttcttccataaagggtactgaattttttttgaagcttgagggtagaagagccgaagtacaattacagtagacaggtgggaaaaaaaaagttgcattctttaaaggaacataagcttttcattgtagcttgaaaacacttgaaagaccaaggacccccaagggtgcccaggcaaggtcactcttgactctacgcagagaagggctgttgctgggagcaaaggatacctttgcccagttctcaccaggggacttgtagtctcgcaagggagggatgttttctgatttgtctacccaaaggccgccctttttctaaactcatgggggagtggctgctgaagggggcagttacagcacctcacgaggtgctgccagcctgctcattggcagaggcttaccttatgaaacactgggcctcagacagtgatgctcaggccccgccttaggataacaatataagtatagttcagattgatggggcagaatttaaataattaaatgtcgttattttaaatttcttttaaacatgatcatttcacatttagttgacattgcgccatttgcccgcagactgtgcattttgcagtgtccatttggccttctaaaatccctgtgaattatatttaaaaatcggaacgtaggactcattcatcatatttaatagggttagggtttatgatgttgcaggttaataaatagccataatagccgctcggcgttttctggagtcagaacaccagaaatagtcccttggctctctttcctttccttgtgaatctttcaaaattcttacattactactcctgcttgtgtgtgtttaataatttaatttaatgccttcctttggaaacattacctcgctgctcacccactcggctgttttgccttctcagcagagtaactgagtttaagacagccacgtgacaggcacagctatattagaaccagcatagtgagaagggatgcagtgcctctcttttctaattgggtagagcaacaattttatatgctttcacattatgtttgttcccaaaaaaaaagaggcaaaattgggagctgaacgtgatcatcattattattttatatttttatacataacaagatgcgctcatacttattgtctcacttaattgtacagcagtccttgaagcaggtgctattgattctgtttgatgagctgaccgtgtctccgataggtcaactggattgtccaggttcacacagcatgtgaaaggccgaatgtgatttctacttcttgaaaccacctttcagcttttttaggagaaaacataatgacataaagagtttcatggacttgaaagtagaggcactgctgaccgctgaagtctgggcagccacaggtgcagggactgggaccggtgtggttctagtgatgccacctgatcatgaagttgtgctgaatcctcagcagactggcttctccctcgtagtaggatgagggagaggaatcaggataacagcctgtccctgtggatggtttattctggttttgttcaccagtcctgctgcctccccgtttgttctcttgcgagctcaggttagagttgaatttctccctacaaccagaatgccagggctggtcctgtaggccctgatgggccagctctgagagtgggctcaatccagtacccaattccccagcattttgctaggggtgcccttctaggagcagggtctcactgcttttggaagtctccaaataaaaaaccatggtaatagaaagggcttgggtctggatagacgtgaatggacttgaatttcagggttggctctattagagagatgatttaacctctctaagactcaagtttctaacgacacctactaatgagggcttcttagaagtatcagagctcatttatgtatagcacctggcatagtgcctggcctgcagtggccaggtagctcaccaaagctccatttctgtttccggttatggtgaatagcctgttgaggaggtggcttccccatgcaggagccaagggaagcagacatgtcgttgtctgtgtgtttcattaaagaaaggacctagggttctgtctgtgtattattgagactaatcttcctaagtcacaatggaaataagctttgctttcaaacgatcccctgtgatttccaggggctcagttttgctctagggcactccatcccaggaccttttcctacccacatgtctctccctcagtctggaactttcttcccgttctcgcctgaatctgtgaatctccttcagccttccccactcttctaatacctatcaagtcctcccctgtcctttgctatcacatcagtgttccaaaaatggcctctcctcacagctgcctgtgacgtgcagtgatatcaccagcagagttgagacaaggacaaggagaagagatttaattctctgtcagtgtcttacaaagcagtaatgacttctaacaaagccgaccagccactagcattttctactttgttcccccttaagccttcttttgggtgccttcactttttacatccaaatgcttgaagctttctactttccccgcggcacatgtggctgtacgagggccctggttagctgcttcaaacagcttgaagagcaaaaacagcccacagcagaacagccaggatgctttggaagggaaatttcctttttgggtttgctgtctgaaagaatttccgatgcaggcagacgttaattcctagctccatgcttcctgataaggaagcagcttcaataaatgcagctatttatagatgtctttttttttttaagaaaaaaaatatataaccagaggtttactgaccttttctttcacttcacatttcatgcagtgagctctgtgtacatttaaggcagttcctccagcgtcagctctgacaaagtggccctggtttcgctgtgggggatggggaggggaggatgaagatggcacggcccctcattagtgtcacgggctctccctttcctcagagttctgaagtagacatttggaaactgttgacaatgggttgtccctacctggtgctctgtgttatttatgtgagcccagaggtgcccagctttattctagactcaacactgaaaggttatagcagactaagagaaccctttaaaaaataaaagacgatgagaaccagtccattttatgaaacttgaacagcaacaggaaatcagaaactttatttccatttcttcttttcttctgtccgttgcttcctcttggattttcccaaccctcaatacgtctgtggtctttctctcgtcttgatgggtttccgcagattgaggagttcctgtccatgagctccacagtcacccttacatgtatctacctaatgctttctggcaggtgtgataaaggttcagtgtgttggcttgaatgtgcttctctaagttacttctcacctcctctgattatcagaaagcattggttgagctgagtatatacaaatacagcagtttccatgctcaaataactgatattttctcccattttgcttcatgtgtgagttacaccacattagtaattcaaacttttggggtttctggcaggatgaccttgacaacttcatcagaggtaaacgttagcagcgacgtttagatgttgctgcttttgctgttgccatgggtggattctgattctcagttgcctgtaccatgtgtgagtgttttgtggttcatttttctgatctcttctgaaggaggggtagagcaggacttgagagatttaaactggccctggctctggccacatgctgactgtaaattcccaagtataattagtcacactgccccaatatttactgcctccatcttgggtgtgtggacaaaaccccattctttcaacattggtctccatttctgcttccagcagatcatggataccagtagctctcaaatggggctgtaagattccagtaatagaaatgcagatgatgggtacggataatggataaagaactgtagatgtggggtggatgacgattggatacctagaagggaaagttgactgcacagggctacgcagtgaataccctattttaccaggtcagctgaggctaaattctctacttctggggtgggggtactaactgaaatggttcactgaggagggtgaaggtttgtaagggaagatgtaacaatacttttttaaaagcacctaggacaagttttagggtgttgaatagcaccatttaaaaattataggggtatccagcaatttatggagctctgattgagaagtatcattgttaggattttattacccatttgttttccagaagtagctcatctttgcaaatgagctttagttttttggtcattgtaccctacctgccagctcacaggagcctgtgtttctccttaggagccactctgaggtcaaccgtgtttaagatcataaagccactctagagaatctctgtggcattgttgtgtggaagaagaaataatgatcactactattattatatatatgtgtgtgtgtgtgtgtgtgtgtgtgtgtgtatataaaagtatatgtgtgtgtgtgtatatatgtatatatgtgtgtatatgtatatgcttcatatatattatcctgaataataacaaactctgcacagtagatattatacctgaggctcaggtaaaccacttgcccgaggtcacccagagaaagtggaggagccccaatttgaatccgtatctaattccaaaacccagacttttattttccacttcaccctattactctttaaaagtctgaggagcaaatgaaagttgtttcattctatctattggttagaaggagaatatccaagctaacaggctgatttttttttccaatttttaagcataatataaattactgacaagagggcccagatggataaaatcagagctataaaccaaattatcttttgaacttgaaggaagataaatttccatatccaatcctgtatgcacactgttatctgccagatagtctcaggtatgtgtgtaaattctggagtgttagaaacaaaactaaatgaagtaaaaagaggttccttgtctattattttccatcttttttaaagagatgatctacctcacagatggttattaaacagtaagaaagatgctgtgattgaatgaagattgtgttactgagtttacaccttaaaacactgaacttcctgataatttgtgttaagccaacacgcttcagaaaaattgcctgacgtttggtgccttagtttacccacatggcatgtgtgccagaacacgctacaacagggtaagagggcagagaacatgctcttgtaggggtcagttccttgagctctggttctacgtggctgattacttgggtcatcccagcagttcattccatctctcaggactgtggtttccacatctgcaaagtgaaatggcctgagtatatgattcctaagttctccccaactcaatcgtcgcattgttctcttattccagaagagaaacacaaggggtatcagcagtggaacattatctgtaaatgccagatttcatgatcattcacttgatttttaggactcaacatcaaattttagtgcagatggtggtactttcatgacacaggaaattgtccttcgttttacctgtgattgttttgggaggaagccctcctgcaaggaaatagggaaatccaacacccagctctgttgagcatttccctatggttcctgtgattgaaatcgggttaatgcttttgtgggatgagaactggtgccagctcctaggccttgcagggcttctaaagactgtccctgccactcttgccttatgctggttcccaggaccttacagccagatcacaggcctgctcccctgttctcatagccccctttctggcctgagaattgtctgtggcttggccctttgccccatgcaacatgcacaggtgtggcttctgctaactatctacttgaccccaactgtgtgattagcggcaatcccctctgcaactcaaggcgtgtttgcctttcctgtaacctgtaaaaaatttcagtctgcgtttttctccctctggagatggtatccactgggttttaggctttacagagccagctgatctgcgtggatgggccacactatcctcccttagccggctccgtagcacatgcacaattaatactgcattaattaattatgggagaaaaaaagcacagttggcaagggaatgaaggctttcagcttctaaagtgaaggctttgatgctgagcttgaaagtacatttccatccgcctcagccagcagagagaatctgtgacacttataccatcccctgggcatgaaaactcacacccaaggaaagtatttctaaatagaggccctcaactagttgctggaatcatctactcattgccatgggctgtgaaaagggggtgtaagattagggagaaaagactcgcccaaagcagcagtgattcgtgaccaaagctgatgaggggttttattttttctccttaagtagctcttaagtcaccaacatcaggaactctttgtagagaaacaaatatgagtaagtgatttggtgccagccctcttgaggacataaaatgactctttctccttcctcctcctcctcgcatgccttgcttcaggaaggaaccctaaggtggtgcaggttcccaaacctgttattcggatgggttggaaggttcatctctgttaggcatggtttcccactagatatgaacaaagtcggggagaaaatgctttcctttttcattctgattccttcacgccattgttcttgaactcctcagctcccacactgactcctttcacttctcctatgaggtggtagtgaagccacctcacaaagtcccctctctgaacagacgcagttctcgttcccctatttacaactctgtcaagcatttttcgtgggggctcttgctgaccttaaaatttggccgtgattcaaatattcatccaggtatctggggttttattaaaggtcttttaggaacacaaaagtaggaattccctgagagaggttttcttcacttgagactcatgggttataaatgaaactactggaatgccctgaccaagtgctgagaggagcttcagagacccacaaaaacctaaaaagatgtgaaatttgtctctgatcaaatagattttggaccttatgaaagaaaataagcttttcttttgattcttagagaaaaatttttgcttcagatgaatccaagtgtgtgtgcacgcacgtgctttcgttgggatcgtcttatagctgttattccagatacctgcttcacaaagcttctgtgattattcctactactgtgacgattcctgccaccccagtgatcggggaaaagaacttgaaatacaactgggtattgtagcattggcactgtgcagacgctgtgtagctctctcatgtctggtacttctttgtttgctaaaggagtattgagattcagaaagtggctgccttctaaacctttattgttcagatagcattactttggacccaggacagagggcttatagttgactgtgaacggggtgaatgttatacttaagcagggaatgtggtcacccagttgcaatgatttagagtgctttgaacataaatatctcccacgatgaatgaccagggtgcctgaaattccattgttgagacattccttttggatcaggcattatttccacatagctccacttttaaaagtaaatcattatggcaggagatagttatggagagagataattaatacctcaagtccctaatatcttaatgaaaattagcttatcagatctcctgaattttttgaagtggaaggaccgtggccagcacggagtgggtagagttggaaataagcactataatttgcttagggctggccttctctgtggataagacagatggaaaactagatggaaaatccaggcctcctgatttagacaaaacattgtgagcctggagctctgaggccaggatgagcagtctgctacttactgtgcgtggccattgctctcaagacattgccatcatcagtcttggccaaagaaggtcaggtctcctctagtacactggcgatttgagaatgtgcaagtcatctgcatttctttgacaggagtagtgaatttgggagtataaatctgaatccttaagcctttcaaccattctcactaaatgtctttacttcagggatgatcacgtttgatcgtaatgccaagatcttgcagatgtataaagggcatggtaatccaagtcttgagttgaagtaagtggtcaggaaaatcttgacccttggggaaggagctaccagagctgggtggcctatgtgtgtgtgacagggaggaggtgtgcagaatttgggggaaagatcctttgtagttctccatgtggaataataacttccatttattgagtgcttatggtaggcgcttttcacatgtattgtatcatttaaccctctaggcagtcctgtgaactgggttttattatcctcatcttactgatgaagagtcaaacttaaagaggaaaaggaacttgaccagagtcacagaggtggtaggtgggagacaggtccatccaatatacaccttgccttccaatagaagccaaagccctattgcctaatctcttcactttaagaacatgaagaatagtgttgagttcccctttgagatctgactgtggttaaagcttcacaaatttcagaaaaacagaataactcactaaaataaaaatttaaagctaccccacagaaaacatctaccacaacccaaaacttcagggtttatatatccagattttagtgaactatatgactctccctagtcccttgctctgtctcctggtaaatactgtccctttcagagccctggcacatacatagtgtaataagatcagaccccatccccctaccattccaatgcaatctaattgcaaagtgaaaatccagggccgtcttagatcctcatctgtctacgtctctcttggtccccactgcttgatacgcagtctcaggttcaataccattctctctttttgtgctttaggtctctgtattgtttccttttcaccacttttttttttttaatgaagtgattttaaatggaaaattaaaaacttaactgtgaatctggcagtttcctgctaatgcctctttgctaagaagcttcataaaatactgtatcttattcacttcagcacagctgctgtgggctctcaccacttaaccattcacaatatgtctgagagattaatttttgtaaggctgtggtttgagatatctcccccttccttgttttacttaaaatcctcagtgggaaagcgtgcatggggaaaaaaaaaaccaccaccaccctggataaaaggtactttggtaacatacgtgctttaggaactataatttgtcattttattttcttgtgccctcttcatttgaaatgctgcagcctttctgccagaagtctcaagtttgtgtatgagactgagggggaaacgagagtaggtaccttgtgctgagactgtcctgggacagtcccgtggtgggtgtgagcgtctgtgtgatgcaggtatgcttatttcttcatgaaagccgcaggtactggttgcctctcgcagggttaaaactcttggcggctcacaggaggtgatgaagagcaagggcacgggagaatgaagaagcaggaggaaggtgtgggccagggtcggtttcggtggggtccccacttgctgggtgaaagctgaactgtttatccacacatcccagcagcagcagaaagccaaggggtgttttcaggactcagctgccaaagtttcttgaagcagctctgctcaaaggcatatgctgggctcacttctgagggaaatttcctttttggggaagttgaagcaaaggaatttcctgtgtgggcagacagagcttcctgacttgaaggcttcttggaagggaaacagtttcataatgaaatgacaaattaaagacataccagccgggttcacttcaaaacagctattgagagtgcaggcaaagccctattatactccctcacagaacaaaaataaatcccatcctgacaggtttctgtatgccggattatatccgtccccccacacctttcttcacagccttcttcatgcttcccttcctcccacccccgccattagctgccaccagctccatcttgaacagctctcgagagcagccggcagccaggccgggagcctgtttcttgctcccttgctttgtggctttgcccatccctgacctgcgtggaggccttataggttatgtgacagccctatgctgccaagacacagaaatgacctctttccttccccttttgacataaagcaatgattgaagacgtcttcagcaatggggtgggggcgggcagtcaggggagaatgcagccatttcctcaggccggcctttaaaatcttgaaggcagtaaatgtaagtgctattccggtcttgggagctgggtctgaattctttgctttgttgaaggaaatagggctctgtgctgggtggacgatattcttgtacctgaacatgtcattttcttcagttccatcagcctgcatgtggtgctttgttttgtttctgaaattgacatgatgatgccttaggaactaaatttttttctttaatggaacaggctaggagaaagaaggatggcggtatcatttggggcgtgagaacagtcattattaattaggcttaagttaatgaaataaaaaaggcacaggctttgaaatcagttgtctaaatttaagggccagctctaacaatatacaaccagcaatgtaaccttgaacaagtcactgaacctcccagcctcagtttccttatctctaaaatgggtacagtcatacctttttcacattgttgtgaggaaattagattatgatttcagaggcactttgtgaattcctataagccttcatacttcttattaaaccactattgggatctctggagactgaaatatagtattaggctaagacagcagaattgtagaatttgtagatcaatttggcaaatatttagtagaagtcttctatgtgtgcagcatggctcgactctgtgggggaaaataaacaagtggaaagtttcaggtggccgcatggtatagcagaaagaatattggacttggggccaggaggccagggttcaatcctggctgtcactcagttgcctgtgacttggtatgaactgtttaaccttgatgagcctcagttgctcatctgtaaaactgggagaaatcaaactctatgaccttaataaactctgtccaactctaacattgtataatcagttttaagaggtttttgcctttagcagctgtttataggatttattctaaagagtagggaagaaatattcattgtataagagcttgtctgatgaagaagattgcatgaaaaagctacacttttttaataagtatatctgatgtaaacaggaaaaatgggtgcttgccagatatgtcatctatagcaacttgttttgagggggtctctgaatgctgacatgaaaatgactaggatcatgggttgaacgtgagtttgctcaagagaaggttctcttggggctttggtttacttcctcccagctgctccagggaacactcaggatatttccaaatggctgctcatttaagccattcccgttatggttctccttgtccaaattggcttccatggtacagtcccagtgttgactggttctgctaatttgattctttttttttttaatgtgctgatatgtagttttaggactgctgcattattgttcctctatctttccgtttgtattagtaaagaactattagcaattttgcctcagtcttctaagcacgctttttgattggagaaaaccaaggtaccagaaaacttagataccatgtggaaagtcacagtttactgggtgtgtactatgtgttactagtgctttaataaatttcctcattaattttattctcccagcaagcctggcaggtagctgatagtatctttgctttacacatacagaaactagggcttagagatggtaagtaattgggtcaaggccacagaactggctggtagcagagccagaatttgaactcatgtctgcctgctccaaagcctgtgttctttatcccctcagtgcacccctactgttttgactgctgttaaattgaccttatgcttagaaccgaagtcaaacccgtaccagggctgcaaaaagaaacaaaattaacctcatagtctgcatactctcgaaatggcaaaaaagcctgcaactttccgttgtggaaaataatatacctgggtgataaactgagcaaacatcacccttgcccttgcctctgaaagagagcctgttctagttcatcctggggccagcttggcctggaaccccactggccagctctgtccacaccttgcatattaggacagaaatctgcctaccacattccagctacataaagaaggtggccagcacctgactgcctctttctccttgtgaaattccttggaaataccatttgtgactgcttgggcttgttctgaagaaaattcaaatcttgttctgtttaacaaggattgattgaagaacccgtaggctcagtgctagtacaaagataagcaaggaaggaactcagaataagagagaaaaaacttggataataattatcaaaaccagtatttattgagcacctactgtgcccagtagagtagtaattacaggaggtaaatatctaaaacttacatagctcttcacagaacatacatctgttcttgcttctgtgtttgattttattagctttcctctgtacacataagcttttagtgtatgtcctattattgaagtccagagttttattatttttcacttatttgggcatagatagttccagaatttacttgtcttcctcattctcattgttaatctcatttttcttccctggagaatatggactttcaaaactatttttcaatcaaggccaaaatatttcttaaaattcacttctatttaaaacacagataacatccaggagaaaatctgagaagaaaaaaaaaaacgattttgatggtacctgattataaaagactcacagtactaagttattctttggcacgtgtagcaaaatactatgtaggtgtcatttcgagttcatagtaaggggagaaatggtgtcatttttcctgcagagaaatttaatctttcactttaatctttcattggcctatagcagccagtggggtcttttaaaaaattcttttccttcatattccccgtttgagcttaaggtacaaaaaaagaaaatactcttgaaatgctgtgaccagatctagactgtaacatgccccttcactcctctggtgaggaagtgcgggaaggtggaagacattgaggggttgattatttacttcgtttggaagtaagaagggaggtagctcttatttggaataagagctgtcttcagaacaggtgtgtgctctcctgaagcccagagctgtgactccctgggtgtgtctcttacctgtgcccttgggcaggtggcacgggagaagaatacgataagaggaggatggtacagacagaggagtcacaggctgaacaggctgtcaccggggcaagatgactgacaggtggatggaattcaccatcctttcctttcaatcaaaaaaaaggtagaaagttgctcataagtaagtttgagttatatcatcttcttcatagccgttgctcttcagacacaggtgctggtaatcaggaaaatgcaaggaaacagctctggggaaaaggaacaagcctcgttggccttgagagccccagtagaccatcaggccttgctttggatattgggaggtgacagtgccttctcacgtgcctgacagtttccctgcaccaccaagactctgtgtgactgaggccgtggcccgggtttcaggatgggcattcagaggaaggaagttccccctccttcacttacctcacgcttactagatgctgggttgcctatgcccatgttaaaggaagccagataactttctgtccccatgtgatccaggcccatcctgaagcctgggggttctgaacataagtatggcggttgcagccttccttctgtgacttctggaattcctgacagagagggtcatatctagccactgtcaaccggatgctagacttgttttgttaggcccttcctccttcccttcctctacttatcttccaataaccttaggatttggaggaaattaaaataaaccttcttctagaaaggtgtcagggacccatgcacaaatgtagcctttttgatgcttgagaaagaatgcctttttgacttccgtgaataaagaataagtcacggctaatgagtaagtaacagcacgtgcctgtggtcccagttattcaggagactgaggcaggaggattgcttgatcccatgagttcaaggctgcagtgagccatgattgtgccactgcactccagcctgaacaacagagcaagaccccatctcttaaaaaaaaaaaggaaaaatgcctatgcaatggctctgaggcaccctcatggttgatccaatggccttgcctagtgattttgacatgctttaacttgtgaccaacatctagtctatttgtctcccattagagactggttgtgacagcattgccattgacctgccatatataggaactccagtgtctgaaaacatagcaggactttgtaggtattaacattgagcagtgctttcacattttacagcttaccgtgatgagcaagatattgtgtcaaaaatagtgcattgcagatatcaataagaggtagggtaggcagtgatttcagtggtgtcccactccacactgtaattttgtttctttggtcaactaatgtaagaactgagtctgtaactctaacctagggagccattgctgtgtgtcaactttgttgctttaaaatcttgagacaccttttcagtatctcccactttgtctgagtagtcatacttttaatgatatttaaaagtcaaactctaaatactttggagctaaatctcagcagagataaacttcaaactggtgggagtgggggtagagaaacccttctgggagtcagaatgagatacttgtgtgtctggactggtggcaggtttgtatgttaccagagtgatctccatggtaacggatcaacatggcgccaatgacaactctacactaagagcttcaggttcccatgagaaagtggatcctcacagcaaataggaagaaatcaagaaatatggatccacactccccttccctgtagaattctggccgtgaagtttcagttcatataaccaacaccatgtcctatttaaccacttgggtccctctgagtaaaccaagactcttctgagaatgcagtgttctctcagatttcaactaaattcatacaaagtttaatcagacttgcatagcaaagaactatattgcagtggagcaagaatgtaacttggagtcaggaagcctggcctccagacccagctctgacactgtgatatgaggaaatcacctcgcaggttcttattttccagattctcaaattcccaccagtgctgatggtcaatcatccaattatattgaaagcccttagtatgatacatcagcagtaggaaaggtagatgactaaatataatacagtgtgccttttcctacaccatcaaaggtatgataatgttgtgatcatgtgtataaaaactttcagacacctaaaaagtagaaggtgtgattcatctctgttaaagcttaatctctgagcataacaaccaacatctggaagctaggcagccaacagaggggttaatttttctggaaccttggttgcaaaaggttattagtttgcagaaagactcagagatcactgtttatcttaaaccacaagagaatgtttttgaattcagaagaacagtgatatagttcggtaatttcatgaacctcttccctgggaaaccttatgactcaacagtcaaaggtgtccgaatagtaaagatggttttcagtgatcaggtctgtgcccatgcctggccttggatagactctgaaatgagattctttgtttgattgatggggtgatggtttctgttgtgtacatttgaaggaaaccagtttccccacccaaaatttctaaggagtttaatctttggggtataggggagttaaactacactgagtcaaggaagtaattgattgcatatttcctctaaaagtcagctatggacttgatattgactaaaacaaactagcagttctcttccaccaccaagtcagagcgtctgttcaccattctgcatgattaaaagaacaactaagaatggtaatgctccatttaaactttccttgtgattctctctggtctaccttcaatcaacaaaagcctaaaatttttattttagaatcatgatgttggaagatctttagattgctcataccataaagctgtttctaagattggtctcgggaaggtccaagatcaggattgaagtatgaaaaatcttggccaggtgcagtggctcatgcctgtaatcccagcactttgggaggccgaggcaggtgggtcacaaggtcaggagatccagaccatcctggctaacatggtgaaagcccgtctctactaaaaatacaaaaaattagctgggtgtggtggcggacacctgtagtcccagctactcgggaggctgaggcaggagaatggcgtgaacccgggaggcagagcttgccgtgagccgagattgcaccactacattccagcttagtgacagagtgagactccatctcaaaaaaaaaaaaaaaaaaaatgaaatcttgatcttattgccttgtcacctttttgtcttaagtttactttgttggtataaagaattttttttaattcagcaagagctcaaagagccatatatatatatataaatttttttttaattaaaaatctttctgctcaagtctcaactacagtgagactgaatggaaaatgcaaaagctcttgacatgatgtcggaatgaacaagatggagaggttgaatttgagaacatggtttccttattgtgaaattccagtttcagaacattggcactgtctggttcaaatataaatacacattattttattgtaatccgctagtttaaattgtttattctgcttataaggaagagatccatgatagctgtgaacccctttgaaggagactttatccatggctcagtccaaggtgtttgaagcacttttctcatggcctggctggaaagactttcagaaataagcagggttctggtaggaaaatgaaggcagttgaggaaaacagtgcacatatttgtaagaggactatacttggtatcttggaaaacataaacagaccctagactgtctaccccaagtctgggaaggcggtcctctgaagctgaggttctcctggaactcccttccacagggctgcgttgcaaatgccattgtggaggcatcacccgatgtggtggacctgaacattggggaaatgcagtgctgcctgctgctgcgctggctggcatctgccctcctccgtctcctgggtgctgccacagagaagagagagagagtgaagcgggcagagactggctgttgccatcacacaactgagggcggacctggagctcagccggctgagggtttgagagaccgttgggagcaagacccaaccacaaggcccatggaagaggaagttggcagatctcagaaaggggaggaaaaggagaggtgcttatttgttcatcttgtttttgcttttaaggaaaggaggagagttaaatgagaaaggagggcgagttgagaaggttctgagcagtttcaggtccacggttgagcaatgttcttcctggtcaacaaactgcctggatttcattttggcctgacaacagccccaccacctagggaactgcacagagatcctgtgtgttaaccacgcaagagagtctgcagttagaatactggggcttgtgcagagagaagaattcagaaagtcaaaggctggatgtaggtgaagagactatggactctgccttcatgtcatcagttaaagtgccctgcacacctgcctgtcctaggtcctgtagggatgtgatataacaagcatgagctataccttagtgtctgtgttccagaactttgttggctcccgaagcacctttccctcctcccaagaggaataaacaaatgtaaataaatggtgcccaggttttcatttggctcacaaaagattatataaaactcatagtctgtctgaagtatgttacctgtaaacctgtttcagctaaccaccttttctagcacaatcaagctggtaaaatacatgcctgcacgccagccacggtactgaggaccacatcaaaactgctccttgaaggaacttggagaaaatgaacaaccagcaacttgttagctggtctctgaatgacagagggtactgctttagatgtcccccaggaattctgagtttatgcagcagagggaccgtagccccggggtcaggcaggacaaggggatcagaccttcctcttgctatgtgtggatcattattcagctgaatgtctctaatcaggaactctgggcataaaaacacgatctctgcagacttgtgtgtggctagacgccctctgtgtgctgtatttgtaattctctgtctctgtatggtttcagccttggaagaagctttgaaccagtgatgagtttgctttccgcagtcaaaactgtggtttgagaatttcactgttaataattgggagtaaaggaaaaagctgggctattgaagggtaaagccgatgtccctaggactgtggcctcaggaagatgactggatggcggcagcagaactgatggcagaaaccagggaagctgatgttgtattgcagcctccctcacacagattctaatcctagaaagtggactgtggaaaaaaacttaactattcacaacaaacgtttaccagtcttatttagtggcaggccttgtgatgagtgctggggttaaaccataagtcaaatacagacactgctgtctttattattcattaaaatgtctttagggtaattttgtatttacatcttcagcaaatattaactgagcacctgtgatcaaccacatagctgctaggcactgtgaataccgtggtagacaagaacagacgcttttcttgttaatccgtggaatttacaatctagaggggagactccacctaccccaccagatgtgtgcagaaggcgccatcactgctttagtttcaggtctttgctcaggtcattgctcacactgagtccacatttataagttttcctgtcgggtgagctgccgaagggccagggaacgtgataaaccatacaagcagcgcatccaagaagtggtttctgagcagtcactgagacagcgagggttccctgcactgagcaccaagttattactattttccatacacgtcaatatgttattgattgcttcactgtgctgatctgtttttgtttcatgtggctctttgggtctgtctaacctggtattttcagtctcaccagcatttctaaagttctagagacccatttcatccaccttacaccatgtctaccacagtgccaggcatcaagcctgctaattgtgcttgatggtgattattaccagccccggatttgtaagagtcaccagcagtggcatttcaagatttagcctgggagctcacggttatgtggaaagaggggctcaagactaagcccagggaggttttggggtgatagaattgattctttacactgaacgtgaatcctcagtgatgttttgatgaggatgcgggacattgtgctatgctaaagcccgtcacagcagcattaaaaatgtcccagtatggagacctgacttacaccttggctcaatcattaaattaaataactcaccaaagaataaataccaacaaatactagaaatgttgatttttagaataataaaatatcagtttttgttttttgaactggcagggaatttttttttttttctttttgtagagacagtatcatgctatgtttcccaggctggtctccaagtcctggcctcaagctatcctcctgctgtggccgcccaaagtgctgggataaaaggcatgagccaccacacccagccagaattttttaaatgttaattttcaatacacatgtagctatgaggagatggacacattctttctatctgacacacctggtcactccaaacgttcagcacttcacatgggaggctacatatggaagtgaaatgaaaaatcaccagcagccgcagaacaaaaatataatccagtgagcataacttttatggaagcacttcagcaatatgggtaaaggacctgaaaacacttttgctctttggctcactaattccttttctaataacccatccctagggaacactctccgatgctgacaaaccttcttacacatggttctgcagagcagcagaggccaccaccagcaaggttcaataaattaaggcaggtcattatgtgggactattatgcactaattaaaaatcacattttttaggccgggcgcagtggctcacgcctgtaatcccagcactttgggaggccaaggcgggtggatcacaaggtcaggagactgcgaccatcctggctaacacagtgaaaccccgtctctgctaaaaatatttaaaaaattagccaggcgtggtggcaggtgcctgtagtcccagctactcgggaggctgaggcaggagaatggcgtgaacctgggaggcggagcttgcagtgagccgagatagcgccactgcactccagcctgggtgacagagtgagactccgtgtcaaaaaaaaaaaaaaaaaaaaaaatcacgttttttaaatgctcatataatataattgaaaaggcagggtacaaatctctctcttcagagtcatctcaattgtttttaatccataaaaataaaccaaaaggctatggaggaaaatagttattgtggttatctctaggtagaaggattgtgggtagaatttctttctctttactgtggagtttttttgttttttttttcttctggcattgcccaggattatttctgtccatcagggcgtagtgggtcacttctgtacccagcagcttgcacctagatttattgtgtcaaaatgcaaatctgggcgtgcattttccattgtcccctccccacctgcgcttaaaacccctccttgtcttcctgctgtaagtaggataaatgcaccagctgtactgggcctttcccatttcccatgctgatcacattctctcgcctctttcttctggctacaacacacttcttcattccaaacccttccccctgacccacctccaccccccaccctagcaagattaattccctgtaattctagttcatccttttggccccagtttaagccatttattcatgccaggctttacagaagactcaccagcacctccaatgggcttccaaggtgctctcaacttcccttaacacaggttcccagtttatcctcaccactgaagcccaagagctgggactgtgccagattgatcaccagtgcattcccccagcacacagcaggactcggctcaccctggatggttcttaagcatttatgaatgggtggatctcacctacgtgacctggaacttctctgttctcagagcaagccatgtcaaatagcagaaaatgcaccggctttggagcctactgcaggactagatgtctcagggtcgcagtttcctcatccctaaaaaggggaatcacgatgcttatctcatgcagttattgtgaggttacaagagttactgcttatgaagggccctgtccagcatctggcacgtggcaggtcctccgtgaatgacagcgccttcctgggcagcctggcgagcgcacacgcgtgtgcacacacacacactcctgtgtttaatatagccctgtctgttgtgagccacttgaggagaggtgtccctagaagaaacttttttcccagaaaatgaggcctggctggtgctcatcctgagttcctggaaggcagtgttttcttgtaaccatctgagattcctggggctgggtatagtgcctgatgctctcaatatatgcgtgttgaatcaaaccagaagaagcaggctgaggcactgagtgaaaacctatgtggatgtcctgctgccttttccttgtggagggtagatcattcccaactctgcctgaaactttgatgccttattggaggaagagaaaggtaactcccttgttgagccatagagctcttagtttttctttcttaaaaaaaaaatcactcttctttcaaacaccattaaattagtccagttatgtacactgggcttgtattgcatggtttatataaaagctaagttctttctttaagattggagccctccgtgtgagtgatttcaggataaaaggccttagaggattagacacattattcgtttgtaaaactgattgctcaagtgatacagccctagggctgcccccttattgtagcttcttgaacactgtcaaactgtcagacttgggttggtggttattttatctcgcaaacaaccaaaaccagatttacattgtaagtagatactagcgtggcttttgtccttcctatatctaggccctgaatacttcagagccagattaaatgctttgctctattttttcatagatttgggcttcgaccaaacatacaagttgagcctgttgacttctctctttgtggatgcacacgtgcgtctctgcgtatatttgtgcatgctttcccgaataagtcctcttttaaaactcagcctttcatcattttagaaatgatttgctcttttacagcttgtactttttatggttcttagaggatcactgcagcaaatatatttggcagaaattgagcacacaagcccttccccagaactcagtactgaatttgttcagttcccatcttaaaaacttgaaactcctttgacttttcctgtgatgtgcttatttctgatctgaaactgtagttcaaagctagacttggtaatcattcacgtcaagaaaggaatggattgctcaaaaaagaagtcagactctaaaaatagcctccataccgaggcccacttttctacctagggaatcaagacagaaatatttccaggattgaaatgacatagttcaagtgacgcaaccatttggctgcctgctatttttctcttttctgccagaaggaaaatatataatgtagaaaaattcccctagagttgttaaaataatcactgaaataacctttggtgcttagtatggtaccctggaaaacttggatctctagaatggttcatttcagagcttttccagatagccaagtttttattagaaaattggttggtatagacggtgctcactgtgactgttcagtgcatgatgagaatccttctttacagagataaaaagtgtgaagagaattgctgagaagtaaccattcattcccttctgcatttgcctagtgtgctgtgtaattaaatgagctgataaaatttacaagaaataaagctttatgcaattacaaatagatgacatgactttttaaaaggttttgcccatatttttcacacacgctctacctttagccttctctgctttcacacagatgctgaaaaacaaaagagttaattagaaaccattccttttctctctttctggtacagagaaggcttccactaagtatgtgctgaataaatgacccagtctgaaagttttaatttattacacagtatattcatagaactgtaactgttacaacctctagtttgatagatgtagctgtttttgtttttttaagttgagattatattaatatctgtcacttgggttgccagccttttagaagaaaatttggggtttatattagaataggttttaggttcagtagcctgtatccttttttactgccctgggacaacagcaaatattcacctaaattcattctgtggtgtaacactttagaagtataccagttcttccttgcaaataacaacaaaaagctctgaacaacttaatcacagagaaaaaaaaagcttttattggaggtatattgggcagctcattggctgataaggtagcagaagcaaaaggatacttggcagcccggagcttagctgagatggagccataaggacagttttattaggatgccaccacagctcggctgccagtggacacatgaattcgtgagactagcacctctgccataaataacatctcaccatccctggggaattggtcactcccttaagactcaaacactgtggcaagtgcatctaattggctgagtccaggttatgttccagggaacaggggagaaagctctgccaatcttgggattcccccacatgcggtatgtggatgctgagcagacaaaaatatagaagtctagtagatgattgtaagttactgtatagcagtgtgtttcatcttgttcttacgtcctgtggaagctttcttcatggcgaagttaagcagttccacatctgcattcccccagatcagcacaccaaaggtgaacagcttgggtttccccctactttcagttacaggtacaagatgttagcaaactatgcaaatctcaatgagttttgtttcctaattctgtttgcatgctaggaaacttgcctcatgatacaacagtaaacccctgctttaagaaaaacatgaggctggtttaatatgtacaatgtccaactcttaggaagtgtttatttttcaattgcctttaataatttctcataaagatcgatgagtctaagaattgtgaaggacctcagagatgatatatttcaacttgtcatccacgtcacgactgtctctttagcatcccagagatagcaggacagtcctcccctgcttgtgtgtattcagtgggaagtacttccctgcccccttttcgtcccgttcttggatggtgctagatgtgaaaaatagagttgaaactcacctcactgtcactttgctcttggttctagttttgccatgtgaaaccagatagggtgtattctttctacattaagtctagagacagaactttggaatcagatatggatttgatgctcagctttgccatttacccaaaatgaaacagttactttaacagtatttttcgtctaatatgtgcaaactaattgctgaatggataggcagttattttattaatgcaacaaaaggttatgttagcattttaatatttgtgttgtattcacattgatcgtttttacttggactatagccaaagtcagaactcttcttttgtggattttttaaacttaaaatatatgcctttacatttaaccctattacgttttatttaagttggctgaggtaatgcctatcatcccttctataaactcctctttcctactttatggcttctatattagatgagtactttctctgtacctttatgttaattatttggaagggaaaaagattgaatgggacgggacctgtgaaagatccctgtggcataccgctagagactgccttccaggtaggcatagttttaaaactataaagttaactttatagttaacaagtatattgtgattatgttttctggcaaataaatctctttgctgccatatgccataaatgacacattatcatttttgcaaatatgcacaatggtactacatatcaattgactgtcagcctaacccataagaaaaagtcaggatagactgtcaagttatttgctgaaatcagatgcactgcttggctctctgtaaaatctttaccaagtaccctctttcactttactcgtctactcatggcaaatctaaaaccttctacttcagcttaggcaagacatcttcttgggtcagtggtagatgtgaacaatcttcgtgggtcagtggtagtttaacagtttgttaaactgttgttaatcaatgtatctactctcggtgattttaagagagaaaagaagactttttgtttttgtctgagaggagtttttaacctggaaagacagctgaaacgttatctgaaatgtgaaatgttaaacattttattattaagagacagtgtgttttttattttactcacacagtatgtgtgcatttgtgttttctgcgactgcacatttgtaataataggctcatattttgtttttcattttaaaattggctttgtaggatgttcactaatgtggaaagacagagggattggggaatcactgggaaatgcttggagtcagtctgttatgtagatgtgcaaggtattgactacagagtgagacactcttgcttggttatgtcctatttctctctgaattttttaattctcaaaaagtaatttagaactataacaccttggtttgtatgagtgtaaaatgatttataagataacctcaggtgtgttgacagaagaaatgcaattaaattgtttccatgtttaagaaaaatatgggaggtatatgtattataagtatacatctattgactggctaaagaagaaaagatgactagggtatgccatgctaaggagtttagattttgtgctggaagtttaaataggggagagaagggatgtgtgttcagaaggcttttgtaggtagcagctgtagcaatgatctaggtgagaaaaaaataagtacaagccaaagcagtgtcagagagatggagtgaaagagaaacattcaagtgattaagcagattgattgggcaaggtgagtggcagatcagatgaggagcaagggatgggaagcagaaaagacaagtctccgtggagcccattatctagagtggcaagacgagaaggaagagcctataagagggctccccagagagacaggagggaaatcacagagatcaaggaaggagaatttcaggaaggaaagaatgatcctgcccaatcagatgctgcatagaattcaggtaagatgaggactgaaggtgtctttggcttttccaagtagggaagtcatcagtgacccagtaagcacaatttctgtggcggggagaggcaggtggaaacctgattgctgtgggttgaaatgtggaagaaagtgattatagatgactctcttactggattggaatcgagagaaaagataggatctggaaggcaacagcgggtgaagggaggtttttgcttttgttttgtttatttaatggacggtatttagccatgtagaattgttggtaagaatcagagagttgaaaataaaggagaaatatggggtgatttatggaacagagtccttgtagaagtgagaaaaaataagaggcaaagtaaaaatggaggtattatttcattttcaatggaaagatggacacttgttacactgaaatcagaggaaaggtgtgtgtgaacataagacagttgtttgtatgggggcaggcttcataacttgtggaaactcccacttcacagcctttttgtttgtggttggttgtttttttgtttgtttgtttgtttgttttgcctgagaagccaaagatacaggaggtggcagtgaaggaaatgggagagtgcctgattgagccaagctggggtccccccaccgcgtggcatcgcctcccagtgggaggcctggagtttgtattgatactaatttgtctgtctgtgtggtttccccctgtgctgctcaacaccgtagtgtaggaggggtgaaaggagatggtgagacccattctttcaggaaatattaactgagcacctgctatgtgccaagtgtgttctaaactatcaagatacaggccaggcacagtggctcatgcctgtaatcccagcactttgggaggccaaggtgggcggatcacttgagatcaggagttcgagaccagcctggccaacatgttgaaaccccgtcttcactaaaaatacaaaattagctgggcgtggtggcacccgcctgtaatccactactcaggaggctaaggcaggagaatcacttgaacctgggaggctgaggtgggaagattgcttgaaccctggaggcggaggttgcagtgagccgagatcacgccactgcactcgcgcctgggtgacacagcgagactccatctcaaaaaaaaaaaaaaaaagatacagaatttaacacaggaggagcaagccatgtgactatgtgagttcaaagtattccaagcacaaacaacaataaagaccttgaggagggaaagtgtttgatgtattaaaaggaacgcgaggaagcaaatgtgtctaaagtgattggcaagtgaggaagagcggagttcggaaacaggagtggggcaagaggacttgggaggaggctgtaggccactgtaaagatactgtgttttttgtcattttctgagacaggctcttgcctcggctggagtgcagtggtgtaatcatagctcactgcagccgcaaactcttgggctcatgatccttccgccgcagcctccagagtagctggaactacaagtgtgcaccccgtgccttgctaattttttttttttttttttttttttggtagaaatgaggtctcactatgttacccaggctggtctcaaactcccagcctcaagcaatcctcctaccgcagcctcccaaaatgctaggattacaggcatgaaccactgcgcctggccgggactttggcttgtattaataatttgccaatgagaattgtaagcaatggattgacatgctctttgaattttaaggaatcattctagctattgtgtagaggataggaagagggagagtgggagaaaggagggggaagtgtgaaagtagagaggcctgttagggatctcttaataagtctggcaagacatgatggcaggccgtaccaagcatgttcctacctcaggcctttgcacttgctgacctcgctcgctgggatgctcttctaccaaatatatacttgaaccactgcgtccctccttcagagatatctgctgaaatgtgaggtcttcatagtaaacctcaccccttcacttgtataccctttccatgacattttttcctctataacatttatcaccatttgacacagtgtatattttacttgtttatttacttagtgcctgatttcctgactaggatgtaagctcaagaacagggatttttctgtttcgttcattgctgtgtccctgatgcctagaacaatgcctgcagtgaggaggtactcaataagtatttgttgaatcaattagggaatgaagctcttccatctccattatcaccaataccacctctacagttataattagtgagaattatggcagtgctaatgttattttttcatttccatgtgtgcctttttggaaagacttgctgcaacaagcttcacatatcttcctctgcagagtagaagtatgtcactaagccatggagttgatttcttggctccttgtatagcaaatagccttgcatttggttcgtgtcagtctttgcatctttttttagtcacgttgcctacacccttcacaatcctctagcttaaactcttgagtaactctggacactggcgttagctggaaacttgagaaccagaggaatgatactgccaataacatgccttatgtgcttggcatctaattttggcacttgttttagcaggtttgattgcataatttagccattggctacaaaaaaaaatggccacatatcctgggaggaagggaagatttggaggtataagatggaatctgtcctagggatttgaggacgggctacggttcttgttttttttaaaatattccttcattttcaatactcttgggattattccaggccttatgcattgaccatcactcaatattacttcctttggggagtatggtatgacgccatcatttctggtcttttcatatgaagtctccatttttattatatttttcatgcctgaatctcaggttttgcaatattttctctaccacaaaatctgttatcaattaagtacaacttaatttgttttttttttcacttttccctaattaaagatatatatacgctaattcagaataagtatgaaatataataactggaaataggacatataattgacataatcccaaaataaaaacaaataatttgtagatttagtcctcatagtctcactggatcaatataggatttctgatcaaatatgatgcattttgagaaccctcagtttatgtctagaggagagtcttttatttttaatgtgcgggatttaagttgtaagtgaagaggactgcgtcaagaggcaggatagtagttctaccccaaaacagatgtgtgatgttgaacgagtcacttggagaaggatgccatggagagtattgggccaggtgatttctaaagactcttccagcattaaaatacattaattctttgcatacatccatgccttttgctgcttttgcagctttcagggttaatgagagctgtcaggagcagtatgaccttagagggaaatggctcatatcaagagagcagatgccaatcccttctagtactctccctgggcagatgacccactccctatttaaatccttggctttttttcttctctgataagtgcctgcataattgatactgttgccagtgatcaaacgctgaaatgactaaatgatagagctgaaaaagaccctaaggtgttatctagtccaattatgccccctaaaccccaaagagtctgaaagagtaatggggcccatgagccaagtttagtatttcaaatgtctcgtggtaattctatatttggagacaatattgtaaggttaagcaagctgtggaagcatgaggttgctctgcttatggctggagttataaatgtgaaaatggatcagttattcctagtaactgctcttgagtaagcagaatctttcaaaatgtcatagctttgttgtctaatacataatggccactcaccacatacggctttcaagcacttgaatgtgactgatccttactgagttacgctgtgagtgtaaaccacacatcagatttcaaaaacttagtataaaaaagtgaatatttcattaatttatattgattatctgtttaaatgatattttcaatacattgggttatataaaatattttattaaaagtgatgtcgattgtgtgtttttacttctctttactgtggggactaaaatattttaaattccattatatgggtaacatttctattgggagtactgctctagagtaagagatttctgggtgtgaaaaggctgagactcactccttgttttgcaggtgagtaaggtgggtcagagaggttaggccatttgttcaagatcacacagcaagtaggtagccaagttaggagtaggccagcatactttcctttaccaaaaatggccaaagggatcatagtgatttttttacatggagtctatgacattgctgctttgggtcaaagccaaaaatattgtgtagaatattagcagttttctaaagccctaagcccaagttgtatcacccagtatcaaatccaatcaaaaatatattaaaaagaatacaaggaagaaaaggaaagaggagaaacctccctatagaagacccagtaagcaatctgttttcattcttgaacagatttctttcacaccagtgccctggtattactggaaaaaagtacattaattacgggagtaaagcacaataagaaaacatttacaaggagtccagccctcatccatcatgcctttccctccaacaaagcaagaatctctttaacaaatacccattaaaagattaagcctaagaataaattgtttcttagtccccaggcagttcatttgacatcatttccataggattagggactccagcaatatgtgtttagcacagggctatagtcacactgcatagtattggtctaaaccattccaaaatatttttttagatctcgaactaataagacttttatgtggctggtaattatactaatatttcacccacaaattgggcctttttccccctccacagtgtgtaaccaaacgcagcaattctgcctttaaaaaaaacgaaccaccacctgttaaaaagtggtctaggaagtatagcaatgtcatggagctcttgaggatgtgtataattgaatagaaaggaaacctagcatctggcgcactcagttcttagtcccttttcctctgagccatcatttctcttctgataactgtatttggttcttataattactgatactatgatgtgtggagtttaaagtacccaacagttgtataaggcttgttacaaacaccttcaatgtccccactcccctcccttcactcttgatttctttttgatttcctgctcaccagggcaaccacattcaaatcttttaactgattcttttgtcattcacctcctccaattcttaaatcacgtgcttgtattggtttttttttttttttttcatttctaaatattatctagcattatttcactgtaggaaatgacagtttgtcctttcttccccctaccccaacccctcccatagatgcatcctcgtaatcataattttggacagaacaatttagtgtttacatattaagattatataagtgccatttgaagctgagtcacctactcttttatggttcttcttttccagtcacttttctttttccctggagttgataatgatgcttttatagtatatttattgtttttgttgttgttgttgctgttttgagacagaggctcacattgtcgcccggactggagtgcagttgtgtgatctctgctcactgcaacctctgcctctcaggttcaagcgattgtcctgcctcagcctcccgagtagctgggattacaggcgccagccaccatgcccagctaatttcttgtatttttagtagagacgggttttcaccatgttggccaggctagtctcaaactcctgacctcacgattcgcccgcctcagcctcccaaagtgctgggattacaggggtgagccacgatcgtatttcttgttttaatgtccttcttacttggttttttatctccttcactaattcatccgccctgcctcactctcctctcagtagttcagatgccataggtgtgatgagccttgaagcaagagcttctacctgcttcggtctgggcttcagcttggtgcccagctatgacctttgttcactttttctctccttcgggtgtgagtccctttcctgaattctggccttaatggaggacaatttccaatagcttcctgagaaagggtaggggggaggcaactttattgagaccttgcgtgtctgaagaatgtctttcttctttcctcatacttgatagattatttcctcatacttgatagattatttgtcttactgtatgattttagacatggggtaattttcccccagaattttgaaggtagcactccattgcattttttttcagtgccattgttgagaagaccatgccattccgatctttaatcttttgcataaacctttgtttgttgacttattgttccctggaagcatttttttattccccagattctgcagttttacagtaatgtgccttagtctgggtctgtgctaatcctgatgctctttcaatctggatattcatttcctttcattctgggaactgtcctcctgttttcttcattctttctccagaactcccattattaggatgtaggtccaataattatctttatttttcacctcttaatattttaagttcctcttggagagattcctcaaccttttttgtcagcacttcttttttttttgtttctgatatcatacttttaatattcaagtactttttttgttcgacttgttcttcattatagcatcttgtttttgtttcatagttgcaatatcttatttctctctggatgatatttttctttccctgagttgtctgttttccccacgttgcctttgtctggttttggtctttgttttgctgtctgccttctatactcaaacgtctggtgatccctgcatgtctgcccatttctgagagttgatggacccctcaagcactgaaggcaagttctccgtgcctgggtgaacgtgctctctagggtggcctgcccacacatttccttgggatgccattgggtaaatatctccaggtcttttgtctttggctgcttagattcccaagagatggttgactcttctagtagccatcctggagggtagattctagctgccaacctcctaggagcacagtgggagaagaaggggtagggggcacagtgagcacagtggtcaacatatgcatgttcttttaatctttcatataatttccgttaattccacctagtcattttggtaccagaggataaacttttttttttttttttttttgagacagagtatctgttgcccatgctggagggcagtaacataatcttggctcactgcaaccttcacctcctggattcaagcgattctcctgcctcagcctccctagtagctgggatcacaggcgcgcgccaccacacccggctaatttttgtatttttagtagagacgggctttcaccatgttggccagcatgtgggtctggaacccctgacctcaagtgatctgcccaccttggcctcccaaagtgctgggattgcagctgtgagccattgcgcccggccagagcttaagcttctaatctgccatggtaggggaggagccgtgactcgactgtccagattttcacatgtaactagtgacaccagtccccaatcctttcacggattctgccatgtgaatttggttatatcacatctttccttactatgagtttagaattccgctttcttgggtttgctaagtaaattaccaccggttcttctgctttcaagtttctggtttgtttttctttctttttctcccctccctccacccccttatctcttctggtgtctttgtccttgtagatttgtgccttcttaaaaatctcttcactgttactttagaggatttgggggaacgagaacagagctaaaattaacttcctcctctgatgaatgttgacagtcttcctgccatagggatgttgtccaaaatacgtgttcatgtgtatgtcaaactagagcttctcaggaggaaagctctttgtccattgaaattgttgtcactattgatagtctttttacccttagaccagtacaacttgagtcacacgtgtggcccataaagattcctgtaaggtcgtgcataagggacaagtagttgtagctttgtattcgtgtccagttgatgaaaacaaattgctatatctcctttgttacaagaaatctatggaagaatctggatagaacccagatagttatatttttgtttttacactgacccctttaattcaataaagacatcaatatgtgaatacataataactgacacatactactatataagtgttcattgatattgttatatgctgtttttttttaataatacttgtaaattttccaagagttttatctaatgtttctcaaacccagctgcacaacagattcacctggtggtcgtttaaaaaaaaagatttcatttcccaccttgggcctactaatcttcagggtgggtgcagtagcaaaacagagcttccattttctggagaagaagtgagacattttgagaaccccgttgggagggtcgtacacatcactgatggtcatttagaaagacagcaagatgaagcaaggagccagctctgagagctgcggctaaaagcaaagcctgtatccacagcaaatagataaatcaatatacacgtgtagtataaatgtatagaacacctggaaaccaaggcactatgctgggccctccttctgtacagaacacttaggcagtatgttgccccctttctttatgatgttttgcccctttgtttcagtcagattttacctggataggaggatgagcagaagaggctggtgtggatgtgcattttgttcctgctctcccagtgacagacattgaagtgttggccggagctagctaagaatttactttagacaaaatcctgaataggacccacacaactctgagacggattacatttaaaaattaatcctcggccaggcgaggtggctcacgcctgtaatctcagcactttgggaggccgaggtgggtggatcatgaggtcaggagttcgagaccagtctggccaacatggtgaaaccctgtctctactaaaaatacaaaaattagccaggcgtggtggcgcacgcctgtaatcccaggtactcgggaggctgaggtgggagaattgcttgaacccggaaggtggaggttgtagtgagctgagattgtgccactgcacttcagcctgggcaacagaacaagattccatctcaaaaaaaaaaaaaattaatcctctttcagtgtcaggtcccatttgctaatggggttcaattttcattcatctactgtaaaaccaaacaattcttatttgcagctgagctaaggggcagaaaaaggaggaaataaaaagcattaagttttatttccatgtatgcaacccagaaggttctaaatggttactttatttgagcaacttactttattaatagcaacttcttgtttaactagagcagtgttggaaaaataatttaacagaaattttagttagggggctacgggaggggtgggagatgaaaaactgaagaatgacgaaattcacatccactaatgtttacatttttaaagctttaatgtctgtttttaaggaatagttctttaatttaaaaaaaaaaaaaccttaacatattctctgtatactctagtgttggaacaatggtgactgatatcggagctttcagttggtacagtaataatagctaaagctcacccagcactaactgtggcagatattgtcctaagcactttacatctgctagctcattttatcctcccaagagccctttgagaagtttctgttattacctccaatttaagatgaggaaactgaggcaccaacggcaagcttgctcatgagtggtggagctcccctgttcatttaaccatgttgctgtattgcctggtgctgcttaccacaggtgcctggcccataggactttatgtcctggactgggcaaggttatagaagatgttttagttattagacaaagaaagccatgctgttccttccacacaccatctcattcaaaaccaatggtcactctgtttgggggccactaggagagatgaggttcagagaactccagtaaattaaggtcacaaggtcacacagatgaacagtggctaccactatcagctaggattcaacccaggtcggactctacagctggtgggatgcctcccttctcttagtatatgtgctctgttttgccgctcaggaggcaggaaagaaagatcaaggatgagtaggtgcctgtactcctagttaccttgcgtagcgctatgtgactcttacttgtatttcccaggcataaacctggctgcatggcaaagaaagccaggaaggcagcgttctccttttttgtgtagaagaaaatactcttgcctcagcagcagagaactgtgtccacctactgtttattttcctccccctttttctttttttcttcatcaaaaagatatgaatgctgagatcatcccagagaaatctagaataaataccatgagaaaatagtccctctggaaggcgtcttgtactcctgctgtttgtaaatgtgaaaagctcagcaaccgggcagctggatgggtataaatatagcccacagcactgacgcccgctgaatcctgctttcttagaggcacaatgggaacccacggaagtcagagaaggagcagtaaagcccagtcgatcaatcagcctctctctttctctctctccatcctggaccttagtgtgggcgtgaggatagaagcagctttaagagtgcacttaaaatagctcttggaactggacattggctaagctcaaagacaaggaagatgcttcctatgaaaccgacctctgcctgacccttacctggggctattttgaccattctggtccgtgatcttagggctgtgttctttctcagttcagctgcttgggcacaagcaggttttctagtgcacgctccaggcgtttggcgcctctctgctgcctccgtactcagagatcttattctaactagactcagctgtctgaagcctggtgattaaaaatagcctcctggtgctagctgtggaatcaagggagagatactcagtgagcagagaggtcagcttgacgcaagacacctgactgtcatacctgtgggtttccttgcacctgagttttttatctcttgaggtattttccttttatactctatcagtgcccattttttatggctatgcaagataaaccagtcatttcagatttgtggggattagtagaagtctgcattttggcaggagaaaaccattattttacttggtggttcccagaaataaagtctctagttatcattccatgcagacatcaatgagatttgccattgaggcatacatttatttgttttctctttctcatttggtggtaaatacttcaaagtaaagaaccatgtcctctacttccgttgtaactgcccacaaaacttaataattcatcttacatgtcttgttttgtgaccgttgaactgaccgtaacagcctttctctgatgtccatggcatgccattagtaagagtcacaaatactgtgatactcgcctaatccatttttaaagtctgttcagggatagtctaagagtacaaggcatatgtgcatatttgcttttagttgtttcattcaatgtaagctggatctgtgccttacttttaacttctaagattgcttccttcaaattggacctcagcatataatatttataaaaataaagcaggaactgttatttggttaaagcagaatatacttaaaatattaaacttgggataacttagagaaagccctgaagttgaagagcttggggctctgtcagtccgctggtggccggagtgccccagcaccgggccttcctcacaaaacattctgcctctgattccctatccttggaactggtgcccagttagcaaagagcaccagctgttctggccttggggacgatgcatggaggaggggcaccctccaaggaaaccaggccaatagagccaaagtgaacaatttcagtcatcattgggaaccatgatagattatgtagcactttaatgattgatttcctaaaaaccattcatgcagtctttggaagttcagcttgtcacttactggcgtgccctccagggcttctgtccacatcgatttcaccactacatctccacccatggaaggcatgggccaaacccattcatattccagagaacaaggtgcagtttccatggtatacagaaaggtaatattgtacagtgggcaataacattccagttccggctctgctacttcctacttctgagcaacttggaaggttgcctaacctctccaaagacctagataaaatggggttaagaatagtgtccacttcatagggtggttcgaagaaataagtgaaaatataaatgtaaaacacttagtacagtgtctgtcacacagcaaggactcagtaaatgttagccaagaggggaggaaggaggctgccacccttatctgttagctcagcttcaaaaagcctagcaaaataacatcatgaatttgatctgagtggtcacagcaaatccattccctcactgatgaagctcaaattaccttggccacattctttagatttttccctttgcctctgaatgaagcattcacttgacgtagataaaatacagacacctcagcctccagttcagccactgtccagtcaagcaggaaagtacattgtgagtgagtcttaagtgaaaaggactagttatgatgcatttgagacaagaaagtagatcgagctttaggcttttccttttcttgccggaaaggaaaaaaacaacattgcattaatcatcatctggtcctcggccaagattcgtatttacctgttatgtgccatattcatactcaccctgtaatgtggcagcctcgtgccatttatcattccaacagcccataacagatgaggagacacagatgacttgtccagggtcatcaagcttgtcaatggcagagtgaatgttggagctcagaccttctgactctcaacccaatgagatacaaataaaatagtggaaaccaccagccagccctcccaagtgtttaggggcattaaagacactggccatcctaaaggcgcctcttactcttatacatcatctaccactgaaaccagagcttccgctgtgcactgtccatgcgtggggccgatcaaggacaccaaggctgtgcaatgacaggtttcttctctataaactttccttgtctctttcttttaagacattgaatagcactaagggataatttcttccttttcttttttttttttttgtgtgtgtgtgtgttttgatttttgacacaggttctctctctgtcacccaggctggagtgcagtggcatgaacatggctcactgcagcctccacctcctgggctcaagcaatcctcctacctgagcttcccatgtatgtgggaccacaagcatgccgcaccatgctcagctaatttttaaaatttttgtagacacaaggtctcactatgagctaccatgcctggcctagggtaatttcttaaagtagagctttatctccttgtcgagaggcatttagatgtcctttcttcaatgaaagattctttttctcctctaaagaacccagaaataatttgttggtcctttactatgatgtccctaacagatctaatcatgcctctccattttgagaccattcattctttcaaacaccattatttttattcagacagtgtacctagcaatagtcccggcactgggaacacagaaatgaaaagttactctctttaagaaattcacagttccaaaacctcggctgtacccacagagtcagggtcatagggaagtttcagtaccagatagtgggaggagggccagggctgccagtcgttggtgaatgtggtaaggtggcaggctgttggcagttgagagctggcatccagcattaaccttagaaacaaagagctcaaggagcagaaatccagccacagagactgggattcggtcataggacttctgttattgagaaggactggaagacagagctgggtaggaaccaagataggcatcccattacagcaaaggcttgtttttaggtggcagacaagggcacagaaaagccagcaggagtgactcaatactggttccctgaaccactggtcccaagcttcctcttgataaagggtaggcctggtcccggagtctgggtggagctgaacttcaaagtaaaggagggttaagtaagcctaactggaaaggttctgggccgtaggggcagacagccaagcatctcactgcagctaaaacccaagtaaaataaataggacttatggtatgcacaaatctctcataccagagaaagtggacattccaagtttgtgtgatttgaaggaaaagattttagttccgtggttcttgtaggttgttactagattgctagaatgcttataatataagatagttttgtgtgatgggtttatttgggaatgtgatgatagaaacaaaaggaaattcctttgttttttattaccatacaaggataagattttgagattatctttccaaggaaaacttatcaactatctattatgtatcaggcacaatcctttgtactgggattccaaagacaaataagatagttcttgacctcaaggaacttgtaattcgttggggaagacagataagtaaccaacaaattagaacgtagggtgattggagtgtgtttcatgtcactgcgccacagaagagaagcagttgacttaggagaggagaaagtttaatttgggccatgaaggaaattaaaagtaaagacctccaaattggtgggcagccattgaaggattttaggaaagtgatgtgctgagggatggattataagatcgggggcagaaagaccagttacaagggaaaatcatgctggtcatgccccagtacttacatttttctcataccacctcttagagcccctgaaagtgtagactccactatggagaagcaacacaaatgtgaaatactagcttgcgagccacgtgggtagctctttcctcttcaggaaaggggaatgctagtgtctagaagtgggagagattgaaatgattctgtaatgaggaaataagttacgttagggcacatatataaagaaacagcagaaaaaatgtaaaatctcaatcactctgtagccatgacatttataaaaatgaaaattttacaagagtatttctaaatgctttgaagttggcccccaaaaagcctgcctaccttcactttgagttacaaataaaatccctagtgttgcatagctgtgtgagtggtatttacattctcacacatttcagatctcttgagtccattttgctagtatttgttttccttggagataggagttaattcagtcacactttcttcccctgacaataactgcatttttttctctaaggtagctttccctccaaccgttgcttgttgttcttacccaagacccagtatctgccaaaacaaatgtatgtgagtgataaacgctgagaggaatgtctgttggaccacaggaaatttcctgttcaggaagagatcttgggaacttcctgtggaggagtgcattgtgggacttttggctgcagtcccttgaccacagctgcaattaactaaaggcagagggggaggggagaggaagaagaggagacagctacccacagacattcttatccatgtagcccgaggagagaatgggctcatacaggttcacaactttgcaagtgaactagatgtctagtgcagaacaagatcactgtgcccaacctcctttactgccatccatctttcacagccttcccggtgctttcctagggctcctaaaaacagtcactgtcacattatccatgtgcattccccagtccctcataagcacacatgaagtgtccatgccctctgtagccccaccaactgtttggaatctcttgattagcttctagaatccaggcattggagttggtggtctttctccatcccaacttaagtatgaaagagaggagaggagaacccgtggctctttgacataccttcatgtgaccctaaaagcattagggaaacgttatggaactgttacgaaaaaagaggttaataaatccaattgataagcacaatcaaaaccaacaggagaaccatgcattcttgtgctgcaatgccattacgaaatgaagtcctcgttaatacctcatactccccttcttggtccccaaactgggcacgtctactttgcattcaagtgcctgatgtgtgtgcgtgtgtgtgttttattttttattttttatttttttgagacaacctattgcctaggttggagtacagtggcatgatcactgctcactgcagcctcgatggcctgggctcaagtgatcctcctgccttagcctctgggtccctgggacagacaggcataccaccatgccctgctaatttttaacaattacttgtagagacaaagtgttgctatgttgcccaggctcttgatgtttctttacagccttcactcagtgcttttatggagtccatctctgaagagcagggcttatatttgagtttcaaaaatctaaagtctcagctggtggcaatttacatctgataatatatatgaccttggaagtctctggcagacataggaaaggggagtggacatctaaggactgaaaaatatcccaggccattttctgggtcatggaaaagtaacctgaccttcttatcccacctcctattcatcatccatctcacctcccatccccatcacattttaaattttaattaatttttcattggcagataaaagtcatatgtttatggtatacatacataaaacatgatattttaatgtatgtatacatgtggactggctagatcaagctaattaacatagccattaactcacatacctgttttttgtggtgagaacatttaaaatctaccatcttcataattttcaaacatacacagtgttattaaccataatcaccgtgttatacaacagatctcctgagcttattcctcccatctaactgacgttttgtatcctttgaccaacacctccccacccgcatcccttcttttactctgcttgagttcaacttttagattccacatgtaagcgagatcgtgtaatatatatcttttcattactggcttatttcacttagcataatgtgcaccagattcacccatgttgctgcagatggacttcaaaatgtaaaatattcttcatgagaatgaagttacccccccagaaagggggaccagttactccccagaaagaattaaaaagtagccgggcatggtggcacacacctgtaatccagctaatagggaggcttagttggggggatcacttgagcccaggagtttgagaccagtctcacagtctcagcaacatagccagaccctgtctcatatttttaaaacaagaattaaaaagcaagaatagtttgcagcaaacattttctgagacttttctagataatactaggtttagtccgccctccaaagtagtataattacatcatggttttaaaattaaaagcaaaaatataggtgaagcaaaagtgagctttattcatcgaaaatttgtcctcactcatcccatgtgactttttaaagtgtaattctaaggagactcccagcatccggatggcaaatacgtgaacagagaaacataaattaactggaagggaacaaaatagacctctcagctgaccaattctttgtagctttgacattggcctttaaaagaacgaggcaaacttttttaaagaaagttatctaatttaatgcaagaggtaactctctggctatgacttagggtaattaggcctattttctacattttggacgtgtttcctatggctggaatgtaaaagcttatttaatattgatgtaaccccaaaatttaagtaattggaatgcactatttctatcacattctattgagctgaagtataggttgtgctctgttcaattcaggttgtcttgacaaagactgagaaatagaatggccctccaagggcatacctgactattctgcggataacacagtcacgcaggcatttgctatagtgaaaatactgttatggttaagctagtggtatcttgtatttcaatgataccttacggtttaccagttttcatgtaatatattaacctatctcatttaatcattacagtgttccttggtgtacagatgaggaatcaaactcagatatgacgaatcaaactcagataggctaagggtggaggtagaccaggagaacctgcacccgcatgcattcttctcactgcaagttcaggcaggccaggagatgaaagccagcatgagccagtgaataagcaattatctgacaaacccaaggccagcagaagtaagataacatctttgttcccctccatttcttcctatgccatccagccctcaacccctgctaccttcaagccctgttgatactcacgccctcctgcccacattccttcggtggggcactgaagttttggtggaggggagcagagcgaggaactctttgtttgtgcagtaaggacttccttacaggaaatttcctgtgatggaaactctggggaaacttcctgttggttaggccactgccgggggctgataacctgaaccacttaaaaccttcagggctctgctgctgagaggatgggatggcccttccctgcttctccaagtctgggagggcaagaaagtccaagcgtacagaagcctcaggaatctccctgggatggtattttccaggagctaaaagctatggctctcatcagctgatcttattctagaagaccagccctcatggttaaatggactgcttagatttataacgagaatggtacctgcagcgacatactagctggatgcattaatagggctttggaaaccatctcaaagttctgggtctggttcttcatacatcattttaaaacatattcctgttatattactctccagtgttaagggtttatgagcactgcaaacatttattttcagctctcacttatgaacttggaattctaattaatccttgtcattgtcagacatggttgacactgtatgctgtgtgggtcacttagcaccaagtgtaaatcatctggggtatgtcttgcaggacgaccaatcttaagccatagcacaaaattcttaaatagactttacaatcatttcacctagtttggacttctggtggattattttgttctttgtcagcactccagcaaagataattactcctaaatcatgccttggattgaactgagctttgaatgtctccaatgttgggaattccgtaggttcccatagcagctctcctggcccagctcttagtttgaaagtttggtctcctaattagcctgaattttctctagtgacctataagcccattattgtaagccctgtccttattgtgtcataaaaataattgactccttgtcttcaatctatttcatataggtagacagctgccacatcaagaacgtcttgtaagtgcttgatttaccaaagtccatttctccacaagtttcttcatagttgttttcctggattgggggttattttagccttactttctaaaatgactggatttaatggaggcctctgtcagtcccaactctccaaatttctgccccagcttggtgctctttgctttgtttatagtaaataatcatttcagcatcagaataaatcagtgaactggacatgtctttaggtggacttttgagattatattcctggtccacattgcaaattagggaagaatgaaagaaattataattaactaggaagaaatttgtccgctgagaagtctcccttgttagactcctagaaaatagagaccataatattttataattttttgtcacagtttccatacatatttgttgaatgaatcctaaaagtcaaaagggagctgcttattggatttgagttgcttctagaacatgttaaaaattatgtgaattttctcaatgtatttgtaagaataagctgtcctcgtgattgagtattgatcttcaaaatggagaattatcagtggtgagtgatgctgcatgtaatgtacttataaaggataggaaaaatattttgtaaaaatgccttgggataagctttaaatataaaaatccaaaatggtgatttagtttggggcactcagaggaagaataagaatagggcctgtttaaattttttgcaacatgattactcctggttttacatttgattttgtattatagaatgagattaactggaatatgttataaatacagaaagtctgtcattataaacactagtcagcaccttttgtcttcataagaataattgctattttcaatgcatacttgctctaaaatagaccatattgatgtcataatatgtagactgagcaaaaatattattagtatcatcatcatcatcatcatcttctgatcttcatcaaagttgtattaaaatattttggtattctaaatatcattatcttttttgaaagcctacttagggtaatagaaggatcaggaactttggactctttgacagatttctagttttttctatttttttgctattctgtaaattctttcaaaagatttttatcaggtgtttactgcatactctgaagtgctgggatatatcagtgaccaaaacagatatgacccctgccttcatgttgcttacagtttaataggggagataagtgtctaccaaggaattcacactagccagagagcacattgcccacacagcatccagagtaatctgttgtaagataaatcagactgttacttccctgtgccaaaacctccactggcttccagtttcatttggaaaccttctgagttctcagtatgaactgccaggccctgtgtgatctgaaatttgtaaatctcgtcaacctctccaccctcatcctccatcaccttgtgttctgctagttcctcttcagccaccctgatctttttgctattcttggaacacacaagtttatgttctacctcagggcatttgcacttgctgcccttctgcctatgaagctgtttctccagatactctcatgttagagtccctcaccttatccaggcctctgcttaaatatcacctccttagagaagcttccccaacagcattatccaaacgacaccttccttcactctccatcacctttatcctgcactatttttcttcttggcaattttcaccacctgacatgtaattttttaaaacactggatggtgacccttaggtatctattcaaaatggccattcttgtgcacagctggggtatgatgccagtgggtccacctgtagggtaattggatgggcctggctgtctcatgggagactccagagtcttttcttttgggaaggcaagtttgtccaaaaagaaatcctgtgggctcctccttagaaagagtcaatatatgatggcacttgagcttttaccatgaagatttccactgagttcccctatattccagagctgctcacccttgctccctcctgaacttggcgttctcagattcatcctgattccagcaagggaaatgtcctttcatctgcaaggaggtgcaggttgctgggctgggggagggtggaatacagccatgccacagatgctttattagtcttctctgttccctgcctgccttcagaggcacttggaacccccagtttctgaggttttatgaagttctggtaggaaaacgagtttgtttattggtatctccccctgcaggcagattgagttaagattttctgctcagctgagtcagataccaattgtccgtctgttccagcttccaaaattttgtgcacctccctcaactgccattgtttcctctcccattctgttgtcttgtgggtttgtaccttttttattcctctatctggtttagtgggacgtcagacaggagcagggatagacaagatatgtctcatcaatgtagttacatgtggaggtaaaagcattgatgtagcagtacaggatgctttgaaagcataaaatacagaaatctggtctggtgtgtcgcatacatttaagaggagacttgaaagctaagtaggagttaattgggcaaagaagaaggtaggattatttctggggaggggaacagagcctgtgaaggccctgagactggaagaggatttgttctacagggaatggaaagcccagcccaactggcattcattgaatttgctgtggaaaagcagagtgacacattgctttggtgaggattgcagatggtgaggtagaacaagacagtcacgttaaggattttgatctttatcctaagagcaacaagcatccgtgtctgtgttacctcagtaaccttggacctcgtaaactctgggttcttttataaaccaggcacagtaatatctacctcacagagctgtgtgcattgcatgacatcatatacacactatattgacttaagactgtcatatttgtttgctcaactcatggatatgaagggcagactgtataccttgtcaggtacttttttctttttattgtatcccatgggggaaatggatggtagattggtggaggtggctagaattgtaaagaaaaatatgaaattcacatgaaggctggagttactcatatgacaacaacagcttatggggcccaattctattgctcttgcgtctgtcacacagttgaggttttggaatgaactacgtatgccatccttgttggacagtgacaagtcactgtagccccctaggagaagaacagtataatcaagatgtcaggttgaggaataatctttgtgatcaactgagtgaaaggtacaaagtaagaaacaattgagaggcattgctctgggcccaaaagtctagtaacaggcaattagaggttaaaggataagcatttgatagtgttctagctatactgcaaaatgaatgctgcatgaaggctaactgagaagcttatcagttggtagttgggaactaaagaggaagcaggcaccaaggaaagatggaaagttctacacacctttgttagttacacatggaggtaaatgcattgatgatgaatctgccatttttaggttttcatgtttaaaaagtttcctgacaatgtgtctagcaatgtgctagacactgtagataatatacaataaaatattaaagaggcggctcgtcctcaaggaactttcaagcattcatacatttctgtttgattgtaacatatttattattttaaagaactggccagagagttgcatgttctgtgtagggataaatagcaagtttcaggcccctgcatttattggcacttacgtacatggtagtcctcacacctttgccggacagcaccaaaaatcctgcggagctcaactctgtgacctcaccctttgagcctggaaatcagcatgaactcatgatctgacaatcccgaacaagctaagcatttcttaaaagaaagcagtgacttttaataggtctcactgatggtgttccaccgattaaatcagtcaaacagaattgtcacattgaagattatcttgggtttctagaattcattctaggttttaaagatgcagacagattctgagggtcacaaacgtcagtttgccaagtatgtttaggctgtaaagttatccatgaaaagaccgtgtggtttgcatgagattgattgtgatcggatgtaactacattgctttttacagctcagtagaaaccactttcaattgcaaattgtagcagaagcaggcgtctacttaattttgatcttaaagaatttcaaagagaataaatgcacactaaatagtggtggattttggtagtatacgccaacatcactttttatttaacacatgcagaaatgtgtactggtagagaaaattggtagagtgaattaaagtacagacagatccacattgactttaaatgaatacatgcacggtcagaaaacggtaaccctgggcaggaatctttaagttttcagggctcattagacagtgagcaggtgaggctcaaggctgagtttgcaactgtgctgtgaaaactcaaaaatgaaagtttttttcatttctgagcctgttgaaaagtgggtaagaagggaaagggcagtctcataataaaataatatgtaaaggctaaccaaataacccactttagtctttacttactggcaggcagcaacatgtcctatttacagagggaggctttacctaagtggttatatgtaaatgaaccaccttttcaatgaaacaggatgcacctgtctagaggtgtctgttactagagcaatggatgtttgattggactgacaaattttatttcctttttggaaaaaagaatgtaggtggtatcaaatcaccctttctcctggtaacaataggaattacttcttgaacttgagaaaccagtagttgcttgacctatgttttttgcatttagcatagtcttctaaagtagtaggagcatacgtttttgtctttaattccctgcagaccccttccccaatgatcatcagcaatacatccacccataaatcaatgaaatcataaaaaagaaacataaaattcacttgaaaaagaatacctacaaggcattcctagaattctcaatgtaagtcattttttgccagcaaagctaattgttctcaaatatttgataacaaggatggcatacgtagttcattccaaaacctcaactgtgtgacagacgcaagggcagtagaattgagccccataagctgttgttgtcatgtgagtaactccagccttcatgtgaatttcatatttttctttacaattctagccacctccaccaatctaccatccatttcccccatgggatacaataaaaagaaaaaagtacctgacaaggtatacagtctgcccttcatatccgtgagttgcacatccgtgattccatccagccacagatagaaaatattcagaaaaacaaaaaacaaaaaaaaaaaacccacaaatgcaacaataaaaaaatacagactttcagaatagcatataacaactatttagatagcatttacattgtattcgttacaagtaatctagagatgatttaaaatatacaggaggatgcacataggttatatgcaaatatacaccattttatataagggatttgagcatccttggattttggtatctgggcggggggtcctggagccaatcccttgtgtatgcagaggaatgactgtactggaaagcaaagtaaagctacaccaaagagggtaatagcaggctataaagtactgagagaaactaagagaagaaagtgaggtacctctgacaaaggagtgcttggaagagaaaggatgaatagaaaaatgggatttcagggaattcattgatgacaggatgacctacttaaaaatgacaagggccatgtgtggtggctcacacctgtaatcccagcactttgggaggccaaggtgggcagatcacttgaggtcaggagttggagacgagcctggccaacacggcaaaaccctatctctacaaaaaaatacaaaaattagctgggtgtgatggcacgcgcctgtagtcccagcttcttgggaggcatgaggtgggagaatgacctgcgctcaggaggttaaggctgtggtgagccgtgatcgtgccactgcactccagcctgggtgacacagggagaccctgtgtcaaaaaaaaaaaagataggaagtgagcaaaagagaggtcatagataatggcatgatgaaacagaggaaaaaaaggataagaaggaggaagaaaaaatgtacaataaaacgagaaggaaggatgcaaaatgaatataggaaaaacaagagaactgaagacaagaggaaaaaaggagatggtagaagggaggaatgaaagtaagtaaaataggaatgaagttcaagatctatttagccatagctaaaggaacgtattatcagctattgatttcctcttctaataaagaggagaatgatatggatagtccagaataatggatcatttgcaaaacattaatgtgtcttgacttaaggtacatgtttataattacctcgaactgtatatttgtcttcttccatgtgtggttttaaattattttaccaaaatggggaagccaggagatacatacttgattcagtaaaaccagctttttattcgtagtttacttcctgctgcatccttttttcggctgagagggatcaatgtctgcaggtgtcccttaatccataattaaaccatatgcacatctaccctcccagtttccctgcccaccataaaaccttcatcttggctattgcttggaaaatggggagggaatagagcttctgcttttttttttttttttttttttttttggagagagtcttgctgtgtcacccaggctggagtgcagtggcgtgatctcagctcactgcaacttccgcctcccagattcaagcaattctcctgcctcagcctcctgagtagctgggactacaggcacgcaccacaacgcccagctaattttttgtatttttaggagagacagggtttcaccatgttagctaggatggtctcagtctcctgacctcgtgatccgcccacttcaacctcccaaagtgctgggattacaggcgtgagccaccgcacctggctggaatggagcattttacttgagacctctgtgagctggtcctgagtatgagtagtgaattccaacccacttttctcctaatccctgtcgtgtcctagagtgagaatatacagaggggttggaagtgggtttatgttcatgggctttctagatggactttcaagtccaagtagaagtccaacttgagagctcgtgtagaaagcccttgaatgtaaacccgtgaagaaaagcacttccttatttcagaaagagcacaaaagaccagcaatccaaaggcatttcgaagaccttgaaagagctgggagtggcttaggtatggagggtgcatgtgtgagtacaaatggcccctcagctcagaaccaagcatctgtgtgccatgatccatggttcctaaatatcatggagggcaaaaagtataaatgtgaattaatgcaagagaaaccacactgaaataaaaaatacctgtggtctcttgagattcaagttggcaaaatccaatctaaaagatgtctgactatcacaattagtgaagtccacaggtcagattttcctctctgttcctgattaggattaacctggaaaggtggattgggtccatctttaataataactacaccttctgaaagatttgaaactattattatctctttgtttgctgctgctttcatagatttatggtaggacttggggttagatggatgatccaggtcacctattccagcctcacactctgcctctattccaaatatgacatcactgagcgatggccacccaccttcccttggatacctctaacaatgggaatctcactgtttcacaggcagctcttttttttttaaacacctccaattccaatttttaaacacctccaatgtccagaaagttctttaaactcttaaatacatgacatttattaaaacaaagcctcaaaccactttcagagtggtggtacagcaaataattgattcttttcagggtttttcccccctgtgttttttgtcttctctaactcaaatcattgcccggatattgcttataacaggagctcagcctcaaccagtctttctgcttttaccacatgctctagtggaatctagattaccggactcatttcgaatctaactaaaaatgagaaatgctctgtttatataaagcttggcaatcaataggaaaaggaaaggctgtttagcaaaggccagtgataattccaagaagcagtgtcttttggaatatgctatggtgacctggccactgcagctatctgcttatctgtctggtttcagatttccagaaaggactcgctgccttcgaaacacttcccagcccttccttgggtgcctggatttctaccattagcagtttactccttgagcatggatttttgcagaaagacatgtagaccagggagatggctcattaagctcttggtggtcatttcaccagagcatttagcatttttaaatcccttcctggatgcttgttttagtgatgatggtggtggtgagatgaagcagggatgtgtagatcatgaagggatgggaaaggggatgatttggttggaacgaagcaaaataacatttctgagtgcctgctaaggtccagcacttttcacacgtaaaattttcacaacaatccctgtgagttgggatccagtttctacagatgaggaaatgaagacaggagactagatgacctgaccaggtcctaggccagtcaggaacagagctgggatttaaaccagagctgcctggtccaaaacctgtgctggtcctgctattttatgacacctagaagggaaaagggcagagaactggaaagctgagatggaatcacctacttaagaattttgcagaaggctaaccctgtctaaaagcatcgctttgcaatcagacacatgtggcagtaaaaatgtcccaatgctaactcattttaagccttggttttagtctacctaaaatttatagaacactgtaaaatatgctacatgtaataagatatttattaggagtcttcttgcacttgttcagaatgctttttattatgtttctgctcattattgtagatattctcccattttggagaaattgaccgcgtgcacactcttcactggagttttgcacaaatcttaccagaaaactggtgaagatcagtcctgaggccccttccgcctctaattccttgcagtattttggctgtactatgtgctgttacactagatcacaataagcagctgccagtttcctcacaggttcccttggggaaggatatgggaataattcttaggaaccccccacaaattatagcaaccaatgcagtaaaacccctttagctcactcctccccctgtgctcactcacatactcaaatatatttagtgctttccttcctctcactccgacacttttgggagagccctgggggtggttgagtaccttgtccttgggtggattttcttgttttctgagactggctgccatcagacttcgggagaggatcttaccagaggcgggtctcttcttcccccgccaccgccctcagtattctttcacagccaccacaaagccacgctttctctgctaagtacacattcctaggactgtaacaaaaggcttctgtgagtttgaaagctgcaggggaggctcctgcgtgaaggcctaagatttaaagggtttcatttctcctgtgctggggactgtattgagtgcagtttgaaatctgcttcaccaccacaaggggaaatagaaatcagccctaaagctgcatggagaccccggctggtctttatcctcatagcttagtgatttcctgccacccaagaggcagtgaggggctccctgacattccggaggccccaggaaccctggctgcggtgacccggtgctggggagggagtgcatggggtaggctcctggttgtgagccttcagttcgccgggatgtctatgctgtgctgtgtggctacttagccaaggctgtgcatgccagccggagccaacagcttcagcaaacctgccctccggggagagtggatttcattgttttcaaagagatacaggaaatcagaattttccatccttccatggagagacttggattggactgagaagagaaccagcattaaaaaggaagtctccttccctttcttccctgcccctcctcaccccagccccagcccacccgccaggggcacaccctccctctgccggcctttgggtggaaaccttcctgcctgcagcacaggcagtgtgaactgcggggctgtctgagcaacccagctcttgccttttcagtagcagaggtaatgtggccacgactcagaattatgggaccccagatgctgaggaagtaaactgacttcttttcagctcacagcagacgcatagacaacagagtagatttcatgttctaatgaaacagtgtagaaactctgtccttggtggctcagtactgtgtggtatgagcctctgcctccctccctccctccctctttccttctcttttcctcccccaccccttcacggcctgccctttcctgattcttcagaactgacaactataaatccagcccaaattcctttaaacaaagggtcaccaagagcacgaccttgaaaagacttcttgtgatatgcacttgcagagttgcatattgttccttggatttaggacaggccaaagaaatcttccactttatttaagaagagcctgtgtggttcgaggccagggccgtggacataggattaaccacaataataatacaatgaagtacacatgcaaaatgaaaacttaataatgaagaactactgattttttccagggagtatcaagcacttccttgtaaattcttacaaggcatgaattatttcctagaaatgatttaggctcttttggaaaagtgcattgattcttttaacatcataattccagttacggtaaaacctccattatctgattttctgtgaattgcaaagctattattaactggtacattttatattttaccagtacagtgacagctgatatttataatggtgaccccaaagttctgtaaaatgccgaattacccactcaggaatcaaagaaagattaaattgtgttaaatagagtttttcatgttaagtgtcttattttattcagatcttgttttagaaagtccaagtgtacatccaccataattttcgagggcagtaccaacttaaaatgttttatcttttcttggctttgtaaacaaaaccttgtaaaaaaaaattttttttttcaatactttgggttcaaactacagatcattcgatctcaaacctgacaggtaaacaaatttttttttcagagtaagtattgcagacatgaaagatcataaatgtgttcaccaaagtgagtgtgagacagatcaccccaaacactctccactatttctctatgatcttagcccagctgtgtgtgttgtgagtcatgcctgggtctgacaccagcattcagaggctggcatagcttagcatccacatcataaagggctcagatcgatggctctccttgtcaagctctgcagccctctctcaggctttgtgagatgtggtttgcatcattttcctttaaggaaatgttatgcagaaacataaatgcagtatacaacgaggaggctttcaccaagaaattaaaagggtacagatgtctaggaatgcaggggttaagacaaaaatgtactgcagggaaagaaatgtgagcagaatgcccctcttttcgcctgcttctgccttgcatccagcccttcccggggagtgtgatgtgaactgccatccaaggtggctgtggtacaggggcagggtctgggggctgcttctgcagcttcagcgcagaaaacccagagctcagtcccagcaaaagcctaaaggagaaggaaacagaggccctaacacaacagaaaatgatgcaccccactttcctgtggttcatcagttcacatacttcccaggagaagtcaaatcacgccccagaataggatacctacttaggacttagtgatgttttatagtcatgtcgaagaaccttcacatccatggcctcatttgatctcacagcaagatgggcatgattaaaaaaaagaagttactcccactttccagatgagaaaacaaattcaaagacagtgagtgccttagctgagtcctatccaagcaaggcagggggcaaagccaggactaaaacacaaggttctaattccttctccatgatttcctgatgcccatcataccctaatagaataggatcaccctgcaaggcaactggtccacatggagagtcctcttggaggacaccgacccgtggtgccacctctgatttgcaagttggtgcattagacaagccctggaatgacagccagaagatctctattctgatcctggccctccgtctacttgggccactttgatcaagccatttagccccgttcccttcaggtggctcagctggaagtaagaatgataatgcccatgcagctgactcacctggtgactgtgaaggccaaatgagatgatgtgtttgagagcactttgcaaactgtggagtattgccagccatttctcctaatttggctcagggcagaaagacatccaggtgaagagcttgatgtgtgtgatgacttaggcttggggatatttgtgaacaggacacaacaaataaattcgtttgacgggcagagggacagtatgctgggtatagtagaaactcttggaacctgcagttattgaagggtttaaaactcaaaaatgatacagaaggcagttctattacagtttctgcttttttgctgttcaacacctctgaagatggtgcgtttaatccttcctgggatggcaggttatagatgacttcatgctgaaagtgacccgtaaggaatatccgtatattttgaagtgtatgtggttcaccaggcagaaaacagtctgccaagtctctcatcccaggcagaaggggtggcacatgcgaaggccagagaatgcagtgcctctgagaactgtcagatgtcagtgtggctggagccaggtctgctagagggtgaggttggaagttaaccaggagtttaggaggccctgggaagcctctgaaaatatttaagcaaaaacagttagctttatgtttttgttgttgttgttgtttgagacggagtctcgctgtcacccaggctggagtgcaatggcgccgtctcggctcactgcaacctctgtctcccaggttcacaccattctcctccctcagcctcccaagtagctgggactacaggtgctcgccaccatgcctggctaaattttttgtatttttggtagagacgggggtttcaccatgttagccaggatggtctcgatctcctgacctcgtgatccacccgcctcggcctcccaaagtgctgggattacaggtgtgagccactgcgcccggccagctttatgtttttaaaagatcattgcctcgttcttggttctcagctctctgatccttttagtttttattggatagaggagagaccttaatgtatacagagactaaggaacttggaattggaaatctgcctggctccctttccctcaacgtgcctgcagtcagccatctttctccagctaagccaaaggatggtgggggcaccacacaacagagagctgagttagaaagggtgggagggaggtggctgaagggtccccactgcagttgacaatttgaaataaactcccactttccttcaatattttcctatagcaaatggaaactttgaccagataccagcttctttccatccttccattagactcacagcccagttaggatgttcacagtcccaagccagggatagcacatgccattaccatagtgggctggatagggggcaggaagcaatgctttccagcccttagaagcctctggtgatgtgctgtgaacatggtgagggaacccgaactttagagtcaaacaggctggtctgcaaaccccggttccagcactcactggactcaggatcttcccaagttagttaactcctctgaccatgtctgcattttctcatctggaaaatgggaacagtaatatccaccctccagagctgttatgaagatgaaattgaaagtgtctccaacgcaccaggtatatagtataatctcaatttatgcttttgcccttagatgccagaagttaatattctttcaatacttattctcgtagaagcaaaagagatcctgtttgtgtgatgttcctacagcctctgctgtactgtattatgaaagctcaagaaataggagttaatgatgaggcacagcaggaagaaaaatgtctctaagatgccaaacagggaaaatttaggaagaaataagaaccaaaaaataaatcagttgatcagggtaaaaaatgtcttatgctctgaacttataactctatggagtaatttccactaatgatctcagtgtctacttaactaatcatgtacttttctagccagaaagacagtacttgtagggtacgttccattttaatgcacaaatcattgttgcttttcaaaaagtcatctttttttccctggccacacacagcaccccgaggcctggccagcccccatgccagctcaagagcatgaactcttaccggaatgggttctgtggggagtacaaagtcaaacataagtaggcttgcattcagagctcactgcctagcgggaaaaaagacatatgcactcataactctaatttaacacggcgtcctagaaattccatatccatcttcaaagttctctggaagcaaaaagacaggaggaaagacatttttagaaggaggcttcctggaaggagtgacttcagtttcaggccttaaaggagatgtgagtttccacatgcaaggagggaggaaaagcatgttgcagacagacgaagcaagtgtgtgagcaaaggcctgcggggtgacagggaggggtgttgggaggtgtgtatctggatgaaggcaggtatggaaagtgctgggaaaaaaggtctgggaaagggccttgggggccaggtgataaggaagttgaatgcctctttgaagagtggggttttattttatgtgcctttggtggggagttgtgaaggtttttattcaaaagagcagtggggctgggcacagtgactcacacctgtaatcccagcactttgggaggccaaggtgagcagatcacgtgaggccaggagtttgagaccagcctggccaacatggcgaaaccccatctctactaaaaaatacataagtaacaaaaattagctgagcgtggtgatgcatgcgtgtaatcccagctatgcaggaagttgaggcacaacaatcgcttgaacctgggaggcggaggttgcaatggcctgggattgtgccactgcaccccagcctgggcgacagagcgagagagactctgtctcaaaaaaaaaaaaaaaaaagcaatgggaatggttcttaaggaagatttctctgggcacactgtatgttctcactgaatatttggtgtggtttgggttttataccagttacgatatggggcttggtatctctgagcctaaaatctgtgctttccaaggacagtagaaatgctagtgttcactttgctcagtactcttccctccacttggcactcatgctgcttctcaagccttggggtgtccctggttctggagtccctcctacccctgcagcccttttctaagctatagtctcacccctcctctgcaggctcccaggcagcctcacctcctcctgcagagggatcagctgtcaccctgctcctccctcctggccctcagcctaccctacccacatgcattcaccatcttaccagtggaacaggcgtccctctcctgtatacagaggtcccttcccctgagctcttctgcctcagcctccccagtgggcttctcccctccttcacagtcagcctctttctcatttgcacctagttccattccatcttcaaagaagcccacttggattgcacatctctcttcactaccacaaatctggttcctcacagccaagttctggaaagagttctccacatggtgtcctcctcctcacctcccattagcgcctcaaccctccgtgatctggtttctacgcctgctgcccctctgccctggctgcagtccccagatgccgaatccatctgccatctgctgcccgaaactctcctggcttgcaagataccactgtcctctgacttgtccccggtcttgtcccctgctgttccctcctttaagaatacaccttttctaaattgcctgctgcctaaatgttttcctctggaaaactcacctactccagcggcttcaacgatcatcagtgcgatggggacttccaaatattttttatctctagcctgggcctttctcttaaataacagatgcatgtgtacaactgcctactgggcctctttacctagatgttgtacagttacctcacattcaacaaagctgaatatatcccccgccaatccatcctctgtgggatgagatgggcgggcccctctattcatctagtttcaggaatcaggagcttggattttgtcattgactgcttcctccacattgaattaatctcttaagttccatcaattctaccccatggtatcttcagcccatcctttctccatcccttctgctttagttcaggctaacaatatctgtcatctccatttctgcaacagcctctgactggccgccttgtaccagtcttgccctgttctaattcattctctactctgcagctggagtgatcctttgaaaacaatatccgattatgttacgcccttgtttaaaattcttcagtgactccttgtagccttaggataaagcctgaactccttagtacagcagacaaggccttccaaggccttcctaataatagctaacacttatgaagttcgcaatccataccccacactgttctaaggtccttacacatatgtcaacatacttaatgctcataattcctgacgtaggtcctgttactatccgagttttacagtggaggaaatcgaggcacagaaaggtaaggcaccttgcacaaggtcacacagctaggaagtgggagaaccaagattcaaacccaggaaacctgactccaggcccacactccttagcaccatgctgcactgtctccatcatgtgccgtagcttctcatccattcagaaatattatattgagtactgaaaatgggctagaagctgcttgagacactggggatatagcaggaatccaaacaaaggtccgttcacatgctagtgaagaaaatgagtaagaaacagcatgattagtaaaattattaggtagattagggatgaatgctaagagaaaacaaaaataagcaagaaagaagaccgggggagtctgagaacagatatgcgatgttagaaggagtgtccagggaggacttgaaggaagtgaggatgtctaggagaagaatatcagctgaaggaacagcaagtccaaaggccctgaggtgggaatagttcctggtaggtctgaggaacagcagagaggtcagcgtggctggagcagaatgaaggagggaaaggatgatggcaggaaaggatggtgggagctgggtacagacaggtcaggtcatatagggcccagaagatcattgtaaagaccttggcatgaactgtgagtgagagataggaagccactgggggattctgggcagagtgacatgatgaaacttacaaacagaggagtgatgtgatttgaatcaatctctggcaggtctgttgaggatagatgcagggaaggaacagtggaagctggcagaccagtcagggaccagtaacaatgatccaggcaagagaggatggtggctgggactaatgtagtagcagcagaggtggcggaagtgggcagagctggatacatttggaaggcagagccaataacacttaccaatggaccagaagggggtgtaaaagaagaaacaaggggctgggcacggtggctcacgcctgtaatcccagcactttgggaggctgaggtgggcggatcacaaagtcaggagatccagaccatcctggctaacacggcaaaaccccatctctactaaaaatacaaaaaaaaaattagctgggtgtggtggtgggcacctgtagtcccagcttctcgggaggctgaggtgggaaaatggtgtgaacccgggaggtggagcttacagtgagccgagatggcgccactgcactccagcctgggcaacagagtgagactcagtctcaaaaaaataaagaaagaaagaagaaacaagggcgactggaaggtgtggggccttggccacagaaagaatggagtttgccttctctgtgatgggaaagattgggaacagcagatttagatgagtgacatctggaggttggttggcctcattaagcctaacgtgcctattaagcatcaaaatggagatgttgaccgggcacagtggctcatgcctgtaatcccagcactttgggagtctgaggcaggaggattgcttgaggctagagtttgagaccagcctgggcaacatagcaagaccccatctcttaaaaaaaaaatgtgttttagattagccgggtatggtggctcacttgtagtcctaaccacttggaaggctgaggcaaggggatcacttgaagccaggagttcgaggctgcagtgaaccatgatcccaccaccatacaacaactctgttgtctgggcaacagagggagattctgtctcttaaaaacaaacatggagatgcattgtcacctcccaccctcacccccatttgaacacacactcacatatatctcacgtcctaatcctactgaactactcaacatttccccaaaccggttgtgctcttttcatgtgtgcaggccttgcatccgctgttcctctgactggaaagctgttggcccatccagttgagaaagtcttccctggccgtgcacgaatgcactaacttgtaaatgtctctttacattcctttcttcccttccagaccgcaaaatccagtctcattcaccttgacatgccctgcgcctgatccgggacgcgaggcatagtgggcatctcctaggttagacggatgggtgagtgggtgagtgaacggagaggtggacaaaatgagtgctcagcagttagacccaactgtgttttgatggtagtgatgggaattcccctggcacatggccaggtgagatgatcattcagcctgaaatgaaagaaacagcagatgtcaggaagtttttgttaatcctgccttgtgcgttagaactctcccgcatacgtcccctttcccgcacactctctctacctttctcccccatttctagctcctggtcttattcatctgtagcatcagtaaacatataccctttactgttcacatccaggtctgtaggggaaattttggttataaaaccggaagagtgtttaacctaatgtcctgctgcgggcttgctttccacgggcctccgggtctgttaaaatgatcaggcctcattatttaggaagctgcctcagccaggcattactaatttgggcattactaattcagatgcctattcaggcaaatgagcaatgaatgtaaagtgcttttgtcagtgaattgcaagtgaagagaagagggagtgggggaagtaaagggaaagtgatagaatgtttgagctttgcttcatttccagaaaggacagccattgcttcctggaagctgggcttggcaacaggcatggaggaatgggaaagatttatttccctttgccaaagctcaataattcagcttgagtatttcaaatcaatacatttcttgcaaagtttccaagggctgcattaaaacagccatttttaaaaattatcagtacatgacagcatcctccgacgagactggcatgtcagggatgagtcgagtcttccaaatagacaagactccagtgagaaaggaggctgccacaagcaggaaaagcgaagttagagctgacagcaagaccaaccgcacctgtagggcctctggcgttcacacacctcattggttttgtgggggctctttctgagatgagcagctggatcgctcctcctaagggcttgcatgggggaatctgtgactataactccgtatttctttgaagatgcaattcatcactgaacttgggaaagactaacttggggaggtctccaccacgatctaggattgctaagatgtctgacaggctgagtcactcatacttttgtgaactattaaaaatttcatagttctgacatctggacatcttgactttcggtgataggagatatggaaagacagtaaaaggctgtgtctttactgttgttttaatccccactagagagtcctttttttctttttttttttttttgagttggagtctggcaccgtctcccaggctggagtgcggtggtacgatctctgctcactgcaacctctgcctcccaggtggaaatgattctcttgcctcagccttccaagtaactgggatgacaggctcccatcactaggccaggctaattttttgtattttcagtagagacggggtttcactatgttggccaggctggtctcagacccctgaccttgtgatccgcctgcctcggcctcccaaaatgcgggattacaggtgtgagccaccgcacccggccagtaattccttctatttcgatgtttcatcttcactagaatcgttccttagttctttcggtgggagaagccattcagccccccttgactgccagtgccctttgaggctctcagccatttgattcttcctgtgtatcccctgtggttgttgtctctgtttctagagtgcagtggttcctgcactttgggctgtaaccccctttggtggggccagagaccccttagattaattatcacatttctttcacttactgccacaaaacccagcagcgattcactaggagaacccgaagattggtgctcttctttatgagacaccaaaggggctctgtgtttcccagcatgaagtcttcagtgacagagtctgggaggacagcacaggcagcagcagtgtaactctcagaatccccacggaagagcagagcagctcaatagcaaaaccaaaacccagcgacgagacatccccaagtcccaccttaatgggacttttggtagcctttggaacagggaaaacccaaaaatagccaagaggtattcaccagaaagcctgaaagtgggagtggttttgctcgttcctatagtagtgagggcaagtggcgtcgaggaggtctgaaaggtgtagagttctctgggccctgtgaactctgccactaaccagccacgctgatggccagctttcaggatagctgtggagaagctgctgggagtagaggcacattgaaaaggttagggatggccaggcatggtggctcacgcctataatcccagtactttgggaggccgaggcaggtggatcacctgaggtcaggagttcgagaccagcctggccaacatggtgaaaccccgtctctactaaaaagacaaaaattagccgggcgtggtgatgcatgcctgtaatcccagctattcaggagactgaggcaggattgaaccctggaggcggaagttgctgtgagcctagatcgcgctaatgcactccagcctgagcgacagagcaagactccatctcaaaaagaaaaagaaaaagaaaaggatggggcagcagagacttagatgcaaggtctcccaaaggaaacagaaccaggagatttcagaaagccagctgccatttatttgaatgctacatgaaaacaatagaagagagggtttgctaaggctggaaccatgccatttcataaaaatttcggaacattgtcttcagatgaaaatgagcaacagaaaagtagtgaggtcaaatcccacacaaagtttttataagataaaggaacagaaggagcagaatagcatccctcaagaaagcgtgccaaaacaacatgcctttagaacaattcaaaaccctacttacctccaaatgagctaaaaggtaagaagaaaaagatacgaagcgtggggcaaacacaacatcaatcagaattagaaaaacttccaaatgaaatgacagactctggaaagaattaaaagtaaaagaaaaatcatttcagaaatgaagagttaactagtgagaatacaagatgaatctttacaaaaggtgattttttaaaagagaaacacaagggggaagcaggaaattttttaaagaagaaacaagaaaggttttaaaaacaactcaagaaaaagtgacaaatattgaagaacggcaaagaaatttcaccacgtggataataggagtctctggggaaaaaaccacaaagcaagctttcgcctgcatcgctcctgtctctgcccctgtcttcacatggccatctcctctcctctgcgtctctcctctgtttccatataaggacacctgtcattgaatttggggcccacctgcataatcttgagatccttaacttaatgacgtctgcaaagagccattctcaaattaggtcttattcacaggttctggggattaggacacggacatttctatttggcagccaacattcagccatctccagtcactgagctagtaagtgacaaaaacaggatttgaatttcgttgtttcattttattataacgtggttaagagagattttaaatatttccattaagttagcaattcttgccaacaacagtagaaagcatgcctttttttttttttttttttttaaagtcagagcctcattctgtcacccaggctggagtgcagtggtataatcatagctcactgcagccactcctaggctgaagcaattctcccacctcaaccttctgagtagctgggacttcaggcatgcactaccacacctggctaatttattttgtttttcaaggagatggggctcttgctatgttgcccaggctggtctcgaactcctggcctcaagcagtcctctcacattggcttcccaaagtgctgagattacaagtgtgagccacaggacctggccaacagcatgcttttacaaatagtagggtagcaggaggccagcctgcagaccgcccagagacctcaccccatcttacgctctgcccaacctcaggggagcatttttgcacttggtggattagcattacttgctccatccatgatgagccactcatgctcttcacagattttccagactcccatgtcaaagttaaaaaacagacatcggcctctttccagaactcagaatattcacatctatattgttaacactcataccttttccagcacagaatgaaaagcacctttgaagaatcgtaagccatgaatgatgacgggccgaagggagtgagggctcctacctcttgtcactcctaccatcctgcctccaggacccctgccacctacttgggagtctgcccttaaaactcaagggtcacctgactcattcctccccactcattcatctgactacccaccaaagctaagtgtgaacagcctgtattgatttatcattttccttttgcctgcttcctctggtacagagatcttcatgctttcatccaaacgaatgaataatgtaaaatcccaggtggggtgacagagccaaggagaaaagtgttctgcagcaagggagggcctcccagtatgagccttggagtctcagataagcccagggacaaagcatgagacatccagttacatatctgtggccctggaaggggagacggggttcgctttgtggtggtgtttagctttcctgactccaagtgaccatcttaagccaggggattagtaacctttacaactctaatactagggaatatattaataactggtgagaaaaaagattacagcttttttattgataggtctataaaagccatttccgtatgaatgtcctcagaaaggaggaataaggggatgagatagaatagaatagagagaagtctgtctcacacacacacacacacacacacacacacacacacacacacaaatgcaacacaattatctttaaatagaagttgcttctccaagtttgtttttttttgtttgtttgtttcatgaggcgtcagcaacgctgttaaaatgatttcatcctgcctgtgtgtcacagcagtctgccccgcgaaatgctgaatcagcagcagcccagacagcctttcggtggagggtagattcgacacccaaaggcaaccaaccgggcctttgaaagcacttggaagcactctccaaagagccagggaagaggacaaggaagaagggggtgcagtggaattctccttaaaaaacagcatgttctagaaaagccatgctttggaggtgctgtaggtcagatttgcctttgggtccctatgtgtattttctgaggtctgttcatgtaaaagttcaacacctctttcgcactcccttctcccagcccccgcgccctgcccccacacctcctgtccacctccacctcctcctcctggaattcagtgattatcaggactgtctccatcctgagaagaggctttttaaaatttcgcaggagaatagagacacccgagagggctgggaacaggcacagctgagccacacaaagccaagcctcctccatgcaagtgacggacagatcaggtcccagttcagaatgagaatgagttttactctggttacactttgcacaggaatgttctgcagactgtgccgggcaccagagatggtccgtgtgcggtttaaaagagcaggaggggaaagaattttcatccctctttattcaggcaccctcaggagagtatccatgttctgtgaatcatgcaaatcctgcaggatctttatgttctctgtaccccatccatttctgctgaggattacaaacattcttgcaccaactttcctccagcagtttcgatttctcaataaatctgtttgaggaacatttcaactcttaatatctattttcctactttttttttcttcttaaactcaggcttctttgtaagcatacatatcagtaagtttgataataaaaatgacctttctgccctgcagtataggaaatgctgccttaatgcctctttgctttagaaactcatccttgtatagtatctctccttgcatagccaagttgcctcattgtacgtaaattaaggttatttgcagtgattgaccctaactactatgaagaaaaactttcaatatgttagcaatgatgtctataataactgaagaagggacattccctatttaaggtcaggactgtgcgtttcaaataaagaaatgacagctcaaacatttcattgtacccccacttctaagtgagaagagggcacccttcgtgtctctcttttctgtttttctccctgaaatatcaggagagacatatatctctcttaaacctgatttggttttcgcattacctcacaggtacatattgtcagaactatttgcatacacgagactaaaaaaaatactaaacggattctccagggatccatggataaacttgaggtagtctataagctttgaaatcacaagcaaatatttgtgtccatgtgcctgtgcattttgaaggggggtttgtttatgaactctggctgaattctcaaagaatcctgtaccttcttcctaacgctgagaagtacttgctctaatctcttccccactccctttttgctgtcccctccccattatcttttttctttttgatatggactttaattaaaatgttgatgcttacgtcaccatacattttctgcattaattttgatttttaaaatattgcgttacatgacttaatcttgattactgaaactttttaaaggtaccccttaaattttgctcctggggcaaatgtcttacttgcctcagcctagcctggggcctgagcgggcacctccttcagccttctttcctccaacctctccctgatccaggctgttttccgcaaccccacctgagccattttcccagcctgcaagatgacaattcagtcccctcctcaaagcactgtactgggcctcatagctcctgccagagccgtcatgcaccttccaagaatgcttgctccagcttctgcagctccagggagctgctgaaagtattttggtcttctggagacacgggacaaagtacaactcatctactatccagtccttgtcctacccaaccccccaaaatgcattgagcacttgctctgtaccaggcactgtgcaacatctctatagggatcacctcatttcatgctcacatttgccctaagaggtaagtactattctggactccatcttaccgctggagaaacagattcagacgcgtaactaacccagcgctagtaagtggtgcagccggtgttttaacccaggacaatttgactgcgaaacccaaggtctgatctaaaatgctacatggctctcaccacattgggcttgctacccagaagcaaaaatgagaagaactcttctaagtcacgtttgtgaggctgagcggcaagctctgggtcagttttgctgtcaacaggttttctgctaaaaacccgtttgtagctaaaactagataaaagtcagaaaaatccacaaaatgaagtttataagaaaaaacatcattcgagggaattgactgtgactttggatctgaacatgaacatagagtgttcttgttcttggactttgggctgaaagacatgagtataaccttccgacctccacttggaaacttagtgctgagatacaggctaaccttgaggacagaaataggaaatgttttggaacttccaattccctagtgacaggatttgtttgcagaaagcagctttggtcagatagcacattcaagattacaggcagacccagaggagtgagatgtggagcttgtcagaatgcatccaaggctggcctgggggttttgagcagatttgcagagagcaggccggtggggaagggaaaggaggcagaaaagtctccggaaaagtgcctctgggaagcagcttgaagggctctgaggacacttggttttcttttgaagggcagagtacacagggaagaactctaagtaaaccctgccctcggcaagcagaggtcagaaggtgctctgtgggcaccgagcagtattcgggatctgcagctagaccaggcctgccatgagaagttgagtttatggtttattattcctcattcccttaacatttttacagtgcattttagagtgcaaggggcttttacatccattatttcctttaacccaggggaagttcactgggtaatacagaaagcctggagctggagttttggtcttaggttcattgtgaccttgggaaagtccctcgatttctgaacttcagtttcttctgaaaatacagttgtgccagctttagctccctcgcagaatagatgatggcatgacatggatgcggaagcatctggtaatgttttgaactgcacagagctgagtgtcctgaccatcaaagccagagctggagtaagtgatcagatgtgtcggggaggagaggggtgccaatcacagactgcagagctggctcagatgtggactgcctaggaatggaaatctttggctgtacagtctggcattaaacctggggactgttatgtgccaggcaccgtgtgcaaatcactgcaaaatccccttcagctacatgcatggacatgttaactcttaacacatgtacctaacaattcacaatttcatctcccagaaggtggaagatgcattgaggagcattgctaatttgcactcaaatctgacaaatgaggaattgtctggaaaagtagaaatgatagcagagggtgagaataaaaacatgattttaggattggggaagggaaatgagagacaagaacagatgtgttttcttgacttaagacaaatttttaaaatgtagggaaaagtatttatgatctcatgatctgaatgctgagacacaactcagagtcatttgggctgctcttgaaaatgaaatcctgacttatcaactgcatatgacccttattggaataagaaggaagggagacaactaaagaaactgatgaggcgatattggggatattctctgattagctcaatttttaaatagtttgtgtgtgtgtgtgtctgtgtctgtgtgtgtctgtgtgtgtgtttgtttgttttgaaatagagtctcactctgttgcccaggctggagtgcagtggtgcaatctcggctcactgcaaactccacctcttgggttcaagcaattctcttgcctcagcttcccaagtagctgggattacaggcgcctgccaccatgcccagctaatttttgtatttcagtagagacagtgtttcaccgtgttggccaggctggtctcaaactcctgacctcaagcaatccaccggccttggcctcccaaagtgctgggattacaggtgtgagccaccacacccagcccttaaatagttttttaaatataaaagtaaaacatgcttaatagagaatgagaaataagaaagaaaaaaggaaaaggagacagggaatatcacctacaattttactgagtgtcaattctttgaatatttttacgtttcattgtatttttctatgcattgagattattacatatgtacacatactatttttcaatatgaatacatactcttcatcatgttactggctgcattaattttctatcatagatattgtcagtaactattacttatttccttattgctgttcctagtttttcattattaaaaataacactgcaatagacatctttgtgcatgaaagattcttccacatactaagttatttctttaaggtagattctgagaagttaacatttacagggttcttaaaatatcactaagttgtttgccagagagatgatgccaatttatcttctcactgttttgtgagtaccagtctaatgagctccgatttttaaaaagatgtatataatggatgaaaaagcaacttaatgaaaagaaacatataaaggagagtttctgagctctagaattttaaaacgtaagtgagctgaaaaccatggaatacgcttaagaaaacaataaatgtgggcagcaggataagaataagcatgatgtcagcctgctgatggggttggatggggtaacatcagcaaatggcaaagaaaccaaaactgttcaacttctttctctctcccatgaaggagaatgattgtcagactgaaacaggtagtgcaaacattgacagaagggaattgaagcctgagatgggtgaattgattgtaaaagcaaactaagttctgaataaatgcaaggctcttggcccggacaaatgacatcccagggtcgagaactcagaggggtgaaagataagccactggcagtgatccttcagggttgtgggaaatggaagctgtactaaaagaataggaactgttggtaacctgattttaggaagagaagctggggaaaatgtgggtacgaaataaaacagctaacctgatggaacttccagataaaattcaggacagattttcaaacatacatgttacgagtggaagacattatcactttggagccagccatctgctcctcatcctctctcctcatcttctttaataaggttgctctaagtgttgtagttgctgtatttcaggatatcaggaaggcgtttcgttgaatttctgatgttgctttcatggatgagcttggaaaatgtccaaaaaccagagtatttagatggattgatcattgaacaactcttcccaaaaggagtcaataacttgatcagtatccgtccaaaaggaggtgactggtgtgtcaccagggtactcccatctcagccctatacgatctgcactttgtcagtaacctgtggaggtgacagatgcttagcaaagccacagatgacgtgaaattacagagtatagatgctagaaatcgatggaaatctggagaagactgcagcaggctgggatgatggttaaaaataataagataaaatgtaatatcaattaatatacattcttacagttgggttccaagtgctagctatatatgttcaggtagggtgagattataaaggtgattataacaataacagtacaaaagcaatagctaatgttttttaagtgattgctctatgccagatattggcctgtgtgtttcatatcatcatcatgtgtataattttactctacactagttttatgtcatctgaaaattgtataagtacattatctatgattcaatgatatttaattcacaggatgaaagttgtcctcatttttcagttgacaccagcaagacacagagaggttaagtaacttgtacaaggtcacacagctgggaaatagaggttccatgcttgtgctcagtgcctgcatgctgaactaccgtgaaactttttctttttaaaatttagtcataaatttaatttgatatcctgccaaaacaccaaataagcttagagagttaggtagtttttaacgtgggctcggagccaggtcacctggattcaaatgtcagctcttccatttcctggctgagtgactttgggcaagtcgtttaacttccctgtgttctagttttctcctccataaatggggatcattcctgtcttacaggattgctgcagggattaaatgagttacatatgcaaagcatttagaatgactcctggcacatagcaatcacttgcttacaagtaagtgcattgctgttattaggctacacaaaaagcactatggtggggtgttaagagttgacactgtagagctagaccacctggatctctgtcatggcaccaccacttccatctctgtgtgctacagttttctcatctgtaaaaaaagaataataatcattgcagtgataagattcagtgtaaatgttcagtaattgctagctgttactatcaatagaagtatattgtccagagaaagaaaaatgctagtcctgttcctactgctgcgtttaggaattgaagccacatagatctctggaggaggcaggcaggttggtaagggtctacaaactgcagtggaggagttatctttggaccaattaaggacgtttcatctggaggcaaaatgactaagcaaggacgtgataactgtcctcactgtgttgagggttacaaaattggtgtgggtcattgaatcaagttatgagacaacatgggatgttgggaaaagtcaggggatcaggggcaggttgatcctgagtcagtctcttaacttccaggcttcagcttccatctttcacattttatgattctgtctccagcacgtagaacctagagcaaattcctgtttatacagaaagtttggataaggagtggttttgctgaatggctactgtagcagaaaagcttgaactgagtgttgctcaaatcaataaaatcacctgatgactaagccctgttttctattaaactgaaaagagaatgcaacagacttcactgggcttttgtgagaattacatgaggtaatatgtatgaaagcaccttatcaactctgaagtactaccccgatgcaagcagttatgttgattattgccatagctagattataacttttccaagaattagaatataatgaaacacacttaagcattaatctgtcttctgtgattcagaagatccttcaggaagttacaaaatctcagggtcatggccatgggcatggagtaattctgtagaaaaagatcctggctgtaaggtattctttggttttttggattcaaattaaataggagcatattgactacatgaaaccctgaagggaatagagatcacatactctaagcccgtcattgtacagatgaagtcactgagccacagagaagctgagtggcctgcccagaatcaaatgttaattcatggcagatctgggaataaaatccaggctcctgtctcccaacatgtttgtcatcattagtttaagaacatctcagaaagtctgaaacagggtcaaaatgtactgatgaatgtggctgcccattaaagcatggaattgaagaaatattagaagtaagtttaagggcctgggtgtgtcactgaaggatatgacacaatatactggacctactcgggagaggggagaagtacagtagaatttttagtaactttcttaatcacagcagttcactttctctgtacaaaattcttttcaaatattctctgaaactaattggcattaaaaatgctgatcttagtaaatggccctcaagaggcacgctatgcgcacagggaatagtataatataggtgcagagtaatggtctctctccttctctcctttttttccttttcctaatgatcattaacatctatattctttgactttgttgaattaaagttgcaagagatggccgtaaataaagcaagttatgtatgtgcctccctcattctgcccatgcagcttctgttccatttgcagctgtgagccgtgtaagactctcaagaccaagcacccatgagtgcctgggagcaagtagcctgtgaagggaggactttattcctggatgcattaaaagcagagtcccacctacacctccctcctcttcccatttataaatctacttctccagggatctacagattttttggctatatttttagtctgttgataatttgagaaagtctccaaggatctaagtcttggatgggtaggagtcaattcactcagtcttttttgaatccctaatggatgttcaaaaccagtctcaattctggatctggatgggacatgcatgtcgaagtacagtgtgatggataagagcacagattctggaaccagattgcctgggttcagatctccgcttctgtcattactagggttatgtgaccttgggcaagtcccttaaatgcgttgggcctcagtttcctaatctgaatccctatcatagggttgtgtgagcatgcagttgaatgagctaatatctattcatataaagtgcttagagcagtactaggtgcatagtagtgcttagtaaatgactattaagtaaattaaatcagcctgattagaattgcctccaggtgcaaggctctatcccatttagacacgctaacacacaaggtcttaagggctttaggtttaaggaaaaggggctttttcccccctcaattctacaccacaacctttttattctattgaattacaaaggaaataacagtgggacttgactttgaacaccaaagtttatccagcctctttccagctcggtgaacgtgtccacctacttcactctttatgctaaaggaagagcagcgacgctgataaatgtattgagtggcctcgagcaggtggcttgctctgtcaagatcacttttgtatgactgctgggatcaccacagtctcccctgtaacttgctgggttcctcttgtacataagccgagggcatttgcatcggttcctggtgagggggtttccacacggtggccctggttgcttcaggggctgggctgtgggagacattaatgggaagtgaaaagagaaactgttgtgcttaaccggcagagctgtttggagtgtgactcttcttgtatttagggaaaagattactcatgagtattttcttccatagaatataaagaacctcaaattactacttgcatcccccacccccttctcacccacctccctccgttgcagcgtgtcctctgcagaaacttcagcattttactctcaattcccctcccaagcaggattcagttctgtatttgctttggggcccatgtttccaataagccaccctgtactttttcctgtttctgcctgagcatcttctgctcactggacctctcacctccaggcaccttcctaggcctgaggaaccagaccttcacatgtgtcccctaatgggaactccctgtgtgaaggagaggaaggtccataataacaaatcgcagcgccattcttgttcaaaggtgacaccattgacagtaaggagttaggtttaaggtttttaccagttcaaaaactgagattttgctgagtaaccctcactgccactcccacctccctgtgattctagatacgtgttttcaaggtcattggagagagctggtacttcccatatccatggactgtttttaataggcatcactttctggccagtcaggagtcaaaaacaaaaacttttagtggctgtattttattctaaagatcataaagcagtaatgcaccataaattattatttgaaattctaatttgtttccatgtgaaaaaaaaattatcctaaaaacaccaagaaaaaagctcttaaatgctcatctctaatgatttccagtgcccagtagttctttttttggtgcactacaaaaaaggaattttggttttgaggggacttccacaggtttagaggaagccaactaccattcctcaaaactacactttgcaaaggagccacttggaagacaatcatgcccagaggccctggacattttccagggcatttgagccgtttgttccccacttcagcaggtaggaagagcagccccatatagcaaaccagattgttctttggcatgcctggtttaggatgaaaggtaattttttccaggatcaaactgagggacacttttataacacacttgtgaagtcttcgtagcaagtttaagtaacttatagtgagagacggaagctcctcttagcaacactgatgccattgctctgtttgagctattgattcacaccatgtgattttagagaatgaagatccattgaacatccagcttcttctgacccagcagttcttaaatttggtctcatgtctccttttgattcttaaaaattaatggagaccccaaagagcttttgcttatatgggttatagttatctgtagttaccatattattacataaattaaacctgggtatttacaaaatatttatgaatttagcaagtaaaatagccaactctatattaatgcaaacatattttaaaatatattttcccaaaccaaaaataatttgtgagaagagtagcattgttacacatttttgaaagtctcttaaaatctggcttaatggaagatggctggacgctcatctctgtttctgcattcaatctgttgcaagatcacatcatatgccttctagaacattccacctaagaaagaatgagagcgaaaaaggcaaataattaatattgttatgacaagatgttttacttcataggcaccctacaaaggtctcgggaaccctgatgggtcccaagatcacattttgagaaccactgttctaacttatcaaagatttctcacaacagcaaaataaaataaaactatagacttacagtcaggctcccagagagccaacctgagccaacctctcagcccctgctctgtacccccctcctgcccacttggttcctactcagagttcaagtaccaccccaccaggaagctctaatgtcagtgagtagaataaaaaggcagaagaccttttatccttactttgccctcttattgccagaggccagcctgatggtttcccagaggctgagtgaattgctcttcctggaagaagtttcagggaacatttcattatttggcagctctggaaggtcaagctcagctctggaacattctttcttcagaaggacgctgggctgcaatcagatcagctctgaatctgaggaccctccaaccacactgacacgtgtcatagttctgagcccctgtgggtgctgtgggcaccctggaacagcccctggaactgggcaaggaagggcaggtctctaagacctaccatcccttaaacacataaaagatctttttctcattttgcctctaaataaaaagttaatctgacagcacaccccagagtagggtttggtgtacaaactgctccctggactcctcttggaggctgcttctgggcttcgagaagcccccagtggggcggctcaaacaagggctggagaggggactcagagttgaacataagggctcttgagatgtggagactcattttgttaactattcagagaccttctccctttattccagctgtctaactgacaagacctttctctctttctttctgcctcatgctctctccaacaggcttgcagccaatttactggagcagggatgacgtagcccagtggctcaagtgggctgaaaatgagttttctttaaggccaattgacagcaacacgtttgaaatgaatggcaaagctctcctgctgctgaccaaagaggactttcgctatcgatctcctcattcaggtgagagtctggactcttggcatatgcccaacttggaaagtctcttagttagtggttggtctttaacacccctcacccggcccaagaaatcccaacagtgagtcatcacaaggaagggatgacgatggaaggaagttgaaggaagattatgctagcatgagccagtttgagggaagaagaggaagtgtttacagaccaagggggagaattttaagtttaggagaggaacccagtttagtcctacgtacactggaacttaagggctctaactgtgccactaagaagaaaaagaaggctggccgtggtggctcactcctataatcccagcactttgggaggccaaggagggtgaattgcttgagcccaggagtttgagaccagcctgggcaatgtggcaaaacctcaactctacagaaattttaaaaattagctgagtgtggtggtgtacacctgtagtcccagctactcaagaggctgaggtgggaggattgcttgagccaaagaggtggaggctgcagtgagctgagattgcaccactgcactccagcccaggtgacagagcgagaacctgtctcagaaaaagaaaaaaatgccattttggccttttgactctctaaaagagatagctgagagtgaatgcaggctgtgaactgctcaaccgaaaacaaagagaggaaggagaaggacgtagaagggctagaaaagaaaatagaactgggggaactgcagataaagactgggaaatgggagatcctagtagccaaggccagtttagaaaggcttcaagtggtttcccttagaagtaggactcgtttgaggtaatgcatcttgtagcctgtagaaatcctaaaaaatacaagcagaggtctcctcgggctcatctgactcagaaagcttgtctaattaagggctcctgataatgcattagaagatttccattcagtaacaagcatctctacctgcagagtgtattgctcatgtggataaggcttcaaagatttgtctcagtttcatttcctaaaccctgtggatatttagaaggtacctgtctgggaactacatatgtcaaaggggaactgtggtctcaggtttatgcctcttgcgggattaattactgaagtactcaaggccctccttttactgaatcccactgcagacctcgactctgatgtaacttgacaaagggcgaggatcctgcagaaggtcttggcatagtccctaactacgttcaacctttatttactcctggagacctgccagaagttaataaactaaccgtcatgaggaaacgtccctcattacaggagatgagataaagccccagcacccgtatctccactgttcttcccagttgccacagaccgtttatatgaagaaatgctaaagaagttccccagaagtagagatgttattgaaacttgaaagtttatatcttcaaaattgagtaatttggaagggacacaaacatacctgaaacattttgtctcatatcatcaattctgtatgtaatctcacaataagaaaactataaaacaaccatgtaaataaatcagactatcctaaatagttcttttgaatttattacaaaatacttcccttttctattccagtggaaactcagagatattatactcaaagaggcaacgttatatatctggaggaaaaatccctacctctttgtgttccaatgaaaccattcatgtaaagcaagcaaaggaaaatacagtggtgggttttgacttgatttgacttggaccttgggcaagctttcctcccaagtctctataaatttccccttcatcctatctcaggtgcacttttttatagctggtttattttcctccacagtgacctcttagcattatttgtgaaactgggttctctctgctcagagctatgaacaaagatacgtgaaaatctgtccgcagttccttgccactttgtcgagtctttgtcaggtgggccatgtggaagatggtgctgctctcaaggaagttactgtccagttagaggcaggattgcgttgatctaaaaggccaaagaaggctggaggagggagagagcagagtagcactggtgtcgggagagaaggaatggagttggtttggaccatgaagaatgggtgggattgagtaggcagagggtaattggaacagcatcaccaagtatatttgggtgatggtgagaatgcccacctgatgagtagaagaggcagaaaaggcaggaagccctgataagcctgatgcactagaatggatgtgaggtgctatatagatcagttaggaggtggcaatagaaattcattccatgagtattcaccaagcaactctatgccagaggtacacaggtacaggctaagggagttcagagattagaggggccatttctagctggcttgtcgaacaaacctcatagacaaggtaatggagcctgactttgaaaactttgaaaggcaaacaagaaggagatgaggaagcatgttaagaaggagatgtaggccgggcgcggtggctcacgcctgtaatcccagcactttgggaggccgaggcgggcggatcacgaggtcaggagatcgagaccatcccggctaaaacggtgaaaccccgtctctcctaaaaatacaaaaaattagccgggcgtagtggcgggcgcctgtagtcccagctacttgggaggctgaggcaggagaatggcgtgaacccgggaggcggagcttgcagtgagccgagatcccgccactgcactccagcctgggcgacagagcgagactccgtctcaaaaaaaaaaaaaaaaagaagaagaaggagatgtaggctggtgtacatggaagaggaattcagagacaagactgcacgtgctagacactccctttgaaacatggtcgaacatcactcaccatgcctctccggcttgtctgattgcctcctcacatttcaaactggtggactgtctcctggaaggcttctcttgactcccatccctacttccctaattccattccactttcctttctcccatcttgttctacctccatctaggctaggtgctgtttctcctttatcttagagcattctttccctctgtcatggcccttgacacagatacacacacacacacacacacacacacacacacagtgttatacattgtttgctgattgtttgctactccggatccctcccctagagtggaaagttcaatgtgggcagtgattgtgttctattaagtcgccaagtctccagtacctaacaccagggcatggcttccaggtggcactcaacaaatgtaggttgaatgatgacccggtttgagagtacccaggttaagaagtttgggttttattttacaggtaattggaaccactggaaagttttgatcagggaaatatgattggagctctctttttgcaacagacattttccaccagtgcgtagggtagattcattggcttacttaaagcaggaaagctagttagagtgtccttgctgtgatcctaatgggaggcagtgaagcccagactggatcagtgagatcaaaataatactcaggcacaaagtggctagctaagatggggagctgacttggaagtagtggttagagttcatttttaaagcaagcaatgccaggacattcaagaaaacttgtcctgatctgcagttggacatctaaaacaagaggcaggccagggctgggaataatagatgtgagcatcatacatcgtctccattatgtagaattttatgagctggggataaagataaatttatacggaaggtaatttaattaaggcacccactagaaagccatggacagaatttcaaggcgatgcctgccagcagggcctgtaggaaaacttaccacagaacacaggagtattgcgaatgggtttataagacaactaagttggagttgagaagacccatctgatgaaggggtcactcagcaagagggggaaggccacaggcatcctccttaggcaggggcaagatctagattgaaaatcctttttattttccagatgtaacatttgccactgtttcttctgacatgggctttctcctttagcagtttggtgtagtgaaagtcctcaggcctggcttctttctacacctggcccttcacaaatcacgtcacttcacttggccttattttcctcatccacaaaatgcagttctcaccacatggatcctaagctcccttccattcttaacagttcagcccaacttcaacactgaaacagtgttaagttgctagcaaacaatgtagctttctatgctctctatatatggaaacaacattctttaacacaactcctctccaatgtagagaggagagcactggactcaatgagttataattacctggaatacgattataccttaagtcaaatacagtagactccctgaatgccatattctttgaccagcttaacaaatttatcgcatctacttccaggacaagaatcctccattttcaacccctaggataaagcagggaacatttgcagtgtgctttaaataattatatggtctctaaccagaagatttcaaggttggagacaaatggaatattttctttggaatagtctcccagttggaggatataacagatgacaagtttataacatttgtaaagttaaagaataaatggaagggatcccaattttataaaacgtcacctggacagaataattttacaaagaccttgggctactagatagttatcacattaactggttctgaagtgatttaaattcagagaggtatttgagtacttgactactttgagactctgagaaaacacattgacaggagggaacagacaggttggcatttatattaacccttacttagggttatccattgcatgacattcaggtggaatggatttaggtacccattattttctccgaacaaggaaacccacaagttattatcaatttaattcatgttacactcacttgctatcaatgctaaaaaagggaaagaaacatatgttcagagttccttcaattcagcaaaactgtattggggatttgctaaatatattgaggattttagtagactaaaatctgcagtcttttcatatactagagtgtgattttgcaaattgtttcttccctttccaacccaccagaacctttgtctttggaaatatgctttgcttatatttttcaaatatagtaaaattttctttcaaagttaaactgaaaatactggtctttacatagtatttcttgaatcaaaattggcctattaatttctattaagcaatggtaggtttgccagattgaagggctgtgtcaactggctattttagaattaagtcagagcatccaaggatataggtcacagaagggaaattgtagccatgaaatgtgggagttgtagcaggcatgacccttgtctgaagacaccagagttggctctttctttactgtgtctttgagcaagccaaaaaaaaaaaaaaagtgtatcacacatcagagaaatgcttcgataggtcacttacgtgaaagtcattttatttcttttcttttttttttttagatggattctcgctctgtcgccaggctggagtgcagtgccgtgatctcggctcactgcaacctccgcctccagggttcaagcaattctcctgcctcagcctcctgagtagctgggactacaggcgtgcgccacaacacccagctaatttttgtattttagtagagatgaggtttcaccgtgttggccaggatgatctcaatctcttgacctcatgatctacccactttggcctcccaaagtgctaggattacaggcgtgagctactgcacccggccatcattttatttcttagctctttgcctgtcccatttgtgaaatggaggtgggcacccaccctgttgtcatatacttgaaaaatgcaagttttagcaatgttaaggttctactttaaacttactaaacttaagaagttaaaagttggagagacctaggtagccttgcagatgacgctaaacattggttatacaagttgatgtgatggtaacgtagggaaaaccaactgcacagtgcttcctttaaacacatacttatttcataaagttctgttttctcgagagcttattttgtttatctcaccttatagtccatatccagctgtaattgtcttactgtatctgttttctaacagatttattcttgtcttaaatatgatacttaaattttcccacaacctgttccttttttctcagggtctctgtgtataagacataaatattaaaccaaatttcaaatatttgttgctaagtaaaagactaatttatttttgtggtcacagaaggcactccagattaaattaaaaggttaattcaattggcctgcaaaaatgcactgaatggaatgcttagaaactaggaccaggctgggtgcagtggctcacacctgtaatcccagcacttaaggaggccaaggcgggcagatcacggggtcaggagatcaagaccatcctggctaatatggtgaaacctcatctctaccaaaaatgcaaaaaatcagccgggcgtggtggcacgcacctgtattcccagctactcaggaggctgaggcaggagaatcgcttgaacccaggaggcggaggttgcagtgagccgagatcacgccattgctctccagcctgggcaacagagtgagactccgtctcaaaaaaaaaaaaaagaaaaaagaaactaggaccaagcagagttagaaaaccaagcagtcccattacaggaatgggcatgttatgcactggtgttttcactgttgaatttattatgtaacttaagggaccgaagcttagggcttcatcctgaacccatcaaaggcagaaagggcccaacagagagaacattctgacatatctaaaaagtacctctcccacaccaggcatactcttactttaaaaaaaaaaaaatggccagagggaatctgaagcctctgaataaaaatcaaagagaagagagagctgtttgcaaattaaagaatgtgttacttagataatctacgtgtaaggatatgtacatagcaaatcatcacctgaaaaatgcagattttaacaatgttagggttctactttaaacctgctaaacttgagaagttaaaagttgcaaaaccccctgggagaggctctaggtagcattgcagatgatgcgaaacattgattccagccttctgagaacaagtagcgtataataagaacgtttaaactaatcatacactttcactgataattctattcctaagcaaatagccgaaggaaaccatccaagagtgggcaaaaaaaaaaagatgcccttaacaattctatttatagtagttaaaaactggaaattccccaaccacccccactgtgggactagctaaacaaacttggggagagtaaatatcatgggatacacggtagcctcacagccattcattcactcactcactgattattttttcagtagattttgcagggctctgcaggtcatgttcaggattttacatgtttgtttgaagacaagtagaagccatttgttttttgttgtttgtttgtttttgtttgttttgttttgttttgagatggagtctcgctctgtcgcccaggctggagtgcagtggcacgatcttggctcactgcaaggtccaccttccgggttcacgccattctcctgcctcagcctcccgagtagctgggactacaggcagaggatcggcatggcaaggtgcggcggtgaaaagtggaggcggggcatctgttgggctgcagtctacgagcaatagttgtgacattaactaaggtgaggcccactgagagacgaggtggttccagaaacagataaaaggcagagtctgcaggtcttggtgaccactttcatgtgagatgagaaggaagagaggccttaacgattactcccaggtttctggtctgatcatctgagcatttgctgacctaagaaacaccatctcatctgtagagatgtttgtgttaggcacatcaaatgtgtggtgcctatatgacctccaggaggaattacttaggagatcacggaatgtggttctggagttcagaagaagtgccaggctggagtagatttagcatagacgagccgattgaagccatgggagtagatgaggttgcccaagaagaagggcaggtgagagacctggggaaccttactactgaagggctggagaaggaggaagagcagagaagtaggcggaaaaccaggataagtggaaatctctgaagccatggagtattctaagagaagggaagtagagattgctggtgagaatgttgttgagaagtcaggcagttccctgagtaccaaccattgccctttggatttgacaacagggaggtgacctgagcaaaagcagattggagaagggtgggagtgggaaccagaatggaaggtgaggaagtggtgagaatggtgttggacagctcccctgggaagtttggctataaagggaggagagaaacaggagcagttcctaacagggaggatggggacaaggggcatgtacatgtggacaggaaaaaaacttgaaactgcttaaaagctaaagggaagaaacccaatagaagaagttggcaatacgactgcaaatggggacagtaagagctaactgtaaactggaaatgtctgtatgaaatgatgtcaactggggaaaaaaattccatccatatgaatgtgactttgtaaaacttacgcatgtgctttaaatacaaaagtactgaaacaaagaacattttttgccagattttgtgagacatgtctgttcacgcttatgacaattgcaagagacaccatccattgagcgtttatgatggcagacgtggggctggtgctctgcacgtatcatctcatttaatccttataacagccctgccaagtctgtggcatagttctcattttacacacaaaaatattgaactaagccctgaactatggctcggagaagaaaaatagcttccctaagggcatacagctgacaaagagaggaacaagattcaaacttgggactcccttgctccagagcccaaattctttcctctaaaattaagtaacttaaataaatttaacccccctcaacagcatcttgcatgttcttggtcctcagacattagtaagattgatcagccaagtcacagcagtattgttcactcgctctctcctgtccatttggaacacattacaatacaataatggaatttaggattctcaaagaacgtgcctggcttttcatgtaaagatcaccaatgcaaaactgtgttttgtttctgtgtgtgcgtgtgtgtgcgcacgcgcgtgtgcatgcacccaggagtatatctagattttatgggcctgaggcttacggtttgggcaatatgaatctttctagaactcttcccagggacctgcgcaagtgaagggccccgaagctcactagcttcatggtacatcagcctctgcacatgcgtgtgtttacatgaactgtgtatgtatgcgtgaagatagatggaggaaccaacgaaaaccatggttctttgaccagtagggctcagttccattgaatagtacaatagaaatactagttagtaccagtcactgtgtttcttttctgggaagagagagaagatttattaaaaatcaaatgggttaagaattttctgaaaaatgccctttgaatttcagccattagctaagttagatatacagtgctgtggcgcatgctctttattttcagtaggcaaataaatataacatttttaaatatattctttatcccagagactgttttggcgttgtttgtttgtttgtttgtttgaaacaaggtctcactctcatgcaggctggagtgcagtgatgtgatcacagctcactgcagcctcgacctcctgggctcaagcaatcctcccagctcagcctcccgagtagccgggacaatgggcacgcatcaccacgcccaactaatttttgttttttttgtagagatggggatctcactatattacccaggctggtctcaaactcctgggctcaagtgatcctcctgcctctgcctcccaaagtgctgggattataggtgtgacgcacagcacctagccagattcttttgttagtaacaccttttagatgtgatctcctccatatatgaaaattggaagaatacatcaagagagcaggctgggtgtcgaggaatgaagggacactggaaatgaaagaagatggagggctgtcttcatttacttagcaacctgctatagacaagacacatattctgtgttacttcacaagccaaaactaagaaccaaagtacagggattgcaggggaagccagattccacctcagcagagaaactttctatcaactagagctgtccaaaaatggtttgcttgcgccgtgactggctacccatcactggaagtacccagccaaagccacttctttctgggagaaggggaggtgggagactcttagtgagcaaagtttgagtcaatctaggaaacctctagaatcctgtctagatctaatattccaagttattactgggacacactatcgctgccaatcatatgctcacagtgcacgcacagcaagtggtccccgtccgcatggtggtgatgtgtttttgctgagccagccgcattccctgacggagcccctagttgctgaggaaacatgtctgtgcatggactgactcagctaaggccacactcctgggtcttagaactaagttttttcgtgacccagtacccaggacctcgggtccatgttcccacccgtagccgcctcatggatagcatttaagataactcccaataccttattagtctcctaataggcttctggtctaggtaggaaactggccgagtccacttgacccgcccctccccctgcttcctcctgcacactcgggaagaacccctctgaccctgctcccttggccagcgtcagtatgggaggctgaagcaagcccatgcagaagcctgggaggtgtgcggcagaccacgtgtcagacccccagaggcttagcccaccaggtcaggatgagacgtccagagaacccaagactaggagagtggcctcagttaaccttctttaccctttctggaaggggaacgtaaagctggccgtgacccagatattcctctattctccatgtgagacctccttagagatctacacacctgtcccaagccactataataatatcaggaatagtaatgatgggagtgtttgtggtggtggtggtagtggtggtggtagtaaaatcaatgactagtgtttactgagcttttcctgtttgcctcacgccatgatgagcttgttacatagaccatcttattgaatcgttacaacgatctcacaaggtagatgccatcaacactgccattttatagatgaggaaactgaggccaagtgacattaaagggcatgcccgaggaggcaccagtctgactccagagcatggcctcttcaccatgctgctgtctttcctcagtttctctctcatgaaaacacagaaggaaaagtcacctgcctgctctccagcccttgtttgagccaccccaccgggggcttctccaagcccagaagcagccaccaagaggggtccagggagcagtgtgtgcaccaaaccctactctgggtgcttcttgacctttccctcctttaaccctcatagcaaatgctggaggtcggtgttattatttgcattttacagagaagttcagggacttgttcaaggtcacctggtgcacaggagttgggactcccaccgaggcagccgtgcccacctctgcagtcagcacctcccaccaccacaccagcccgcctggttaagtgaaccaagctgaacaccctcacagacactaaatttatatttcctggcctccccttccaaaatggatacactaattactggacctttttttttttagtaatagtaatcatcaggaacacatttttcaatgttttcatttttctattccgcatactaccaaaaaaaccagataaaacccagcaagtgtgaggccctgtaaattagcaaaagttcaggaagtcattacacgaaaccaaaagaaacaaagtgttgattaggggcttatttttgtatgagattaaaatatgaatcattaaaataggactgtatttcaggcttcttatccccgcctcatcagagacatcaccatgactactaggtttggattcaatgaattccgaagccgttctcagctctcaaatgcagtcatgtgtgccatggttctgccttatacatagcagtttcaaaagtctggtccaggacacctctgcatcttcctgcccatctccttttaataaaatgcccaagtgacatggtgtctgcagctctttgaggtattttgctttatttagtcatgatactaagtagtggcagaaagttatactaacagcaaccaaatttcaaaggtagaggtaggaacaaagtcaaggcaaaaacacaaggttccctcaggaatcccttagaatagggtatccgtggagttttatttagtgtcagtgatagaggagcaggagtttgtagaaaaaaagaaattaatatggaacgtttctcaggtccatgctgagcttgaaagaaaaaataatacagcaatatcttcaatccaaaatatgccttgaatttaagttggtaattaaaatgtttgtttaaaaaaagtcgctaaaattagagacaaagacccattgtttgttattactgctgactgcatatctgtgtgtggagaagggtgtgaggagacagtcacaggcctgtgatattgtaaagatttatcacccacccccaaagggttttgaggcacccacctgcattttcagcttggatctaagtcaaggggtgggacaagaccatgacaggttttggggtttgtttattttttgctaattactcgtggacacttcaaataccaaatatatcagaacagaaaggcacctgctcaacccagcccctgccatcctctggcaatggcctgacatctctagatgattttctagagattgtggaaccttggagcaatgcctgtgtgcatttttaaaggagggaagcatcccagaacatgccagttccttatagagtatcttgaatagttaccacctctaaccggacttgtgaatttttttcatgtttattcttttcccgtctaggattgagattggttaaaaaggcatatttttctctgtagggaaaatttctgtgaagaatctatgagttgtcattggagcattacaaatgttcttaatgacttcataattcttcgagtaatctgaagtgcaagctaagatagatgtaaaaagaacatcctcacaaaaaataagagcaataaattgggatagtttaaattccctgccattgttcggcagctactgaagcagttcagtaatgtgggaaaatgttcaaaacctaatgtggagggaaaagaggatactcaactattaaaagcccgcttctaactatagaactatagatagtattaacagggcttctgtatcttagtgatgatgggattctaggtcatgttttgttttctttctgattttctgcctttttaaaacatttttggggccgtgcacggtagcttacacctgtaatcccagcactttgggaggcctaggcgagtggatcacttgagctcaggagtttgagaccaacctgaacagcatggtgaaaccctgtctctactgaaaatacaaaaatcagctgggtgtgttggttcgcacctgtagtcccagctacttggagggctgaggtgggaggatcacttgagcctgggaggtggaggttgtagtgagccgagatcgtgcctctgcacttcagcactggcaacggagcgcaaccctgtctcagaaaaaaagtatacgattttcataatcaaaaaagtttgatttacaacttcacatcgctctgaccttttgagtttcaagtgctgcattctgtgccccatgagcttggtgagggtaggaggtggcaggtgcgctccaattgtatctttggcaccgtgccaggcacttagctgctgctccgtagatcgttgttggaaaaacatctttccatttctcgatttccctttcctttttctttccaggtgatgtgctctatgaactccttcagcatattctgaagcagaggaaacctcggattcttttttcaccattcttccaccctggaaactctatacacacacagccggaggtcatactgcatcagaaccatgaagaaggtactggaagaggtttctcttttcttgcctgaggtttagacaaatccaggaagtttaattgttaacttgataagctggtcttcttcgtgtaagttcacttttcattcagtagacaattattgagtgcttactatgtacaaaatacactcttggttccctgaagctcacgatcaaagcgaagcagtgagatggatgtacacagaagcacagaagcgtaaccatatagtaggcaccgtaaaggtgtggtggaagggtccatgacagccaggtgcaggaagcagggtcttctcataaaggaagcaactctggagtatgccttagagcagtgctccccaccctttttggcaccagggaccagttttgtggaagacagtttttccaccaacagtggaggtgagggatggtttgggatgattcaagtgcattacatttattctgcacttcatttctattattacattatcatacataatgaaataattatacaatccaccataatgtcgaatcagtgggagccctgagcttgttttcctgcaactagacgttcccatctgggggtgatgggagacagtgacagatcatcagccattagattcccgtaaggagtgtgcaactagatcccgcgcatgcacagttcatgatagcgtttgtgcttctatgagaatctaatgccgctgctgatctgacaggacgtgggactcaggcggtaatacgagcagtggggagcagctctagatacagatgaagcttcactcacttgcccccaccgctcacctcctgctgtgcagcccagttcctaacaggccatggactggtaccagtcagtgacctggaggttggggaccccgccttagaaatccagcaggattctgataagcaaggatgaagtgaagaacattccaggcaaagaaaatgacgtaagggtggggtaaggctttgaaatagagagcaattagatgacttggattataaagctt

SEQ ID NO: 20 - DNA, 162289 bp, Homo sapiens
gaattcttgggctactcccagaatcagccatgtctctaacaaccagaacttgtgagcaagactcatccccctgggtctgcctcttcagcactcactgttgatggtgacttgtctcattgcttgtacaggtggtgacagtgccagaatatttcaagaataggtttggtagctatcagagtgagatccttctctccattctgtatttattcctctgtatcttcaataagataccagtgagttgtgtaaaatccagcccaagaaacagaaccaagaaaaaaaagcaagaggcaggactcaagattatgctggatttgtcccagcgatttactctgggtcctctaaattacttgttggcctttgttgtgaagccagagtagaaaaaaatgacttcacattcacaaaaaataaaagaagcatcttctttacctcccaagcctaggttacaggtccctcctctgtattcccaggaaccttgggcttacccatctcatatcagtaggtcatgtgcttaaaagaatccaggaattttcaccacctgtacaaaacttaaacttgttctggcttttaaaggctgtcctgcggaagccccagtctacctttctaaatggatctccttatttcctaatggttacacactgtgctctagtcacactgcttgcctcattgattctcaagtccagcaagcttattccaaatcaaaaccctctagacttgctctgtactgtgtctggaatgttcttccctcagatcttgcatggctaactccttgtattattccttgaaagaaaaatagcacttccttgaaggggccttccaaggatgcacccaattcatctctactccattactcaggtcttggtttttgtctttaattagagacagggtcttgctatgttgcccaggctggagtgcagtggctattcataaatgtgatcatcattcactgctgcggcaggccaggtctcactaacgcaggcctctgtaacaactgtttcagcactgactgagtggttaagttaaatattaaaagctgatagagccagtgctctaatacaaatgctggaatgtaacaaaggctcaccaagagttttgtccaggcctttcctgggccttgaagcatgatgagataaaaaaggaattcttaaaaggacccatttagaattaagcaagtttcattgggggtctgaagaaaccccccaggtctccacaaacaagtttattggaggtctgcaagaactcatcaaacctccatgatttagcaggagacaagataagggtaattgccccagcacctgggcccatttagattaagaaaatttactaaggctccagaggaaggtcttcaggactcagatctcagttacagaataaaagttagcacttatgtctttagataaatgcacacttacacgtagacatatagcttagaaggcacataagttctagaaaactgtaattttgagttagtccaaattttgataatttccaggccttctccctgtaaccagttacataaataaaaaactcttctttcccagttcatctgcatctcattattgggccacgagagtaagcagcctgatcctcgttttggtctaggaacacttgaacttgaactcctgggctcaagcaatccccctcctgagcctcccaagaagctgtgattataggtgtgcaccactgcacccagcttcactgctgtttttattttctgtgaaatgcctgccaccatgtgaaagcaatttatctgcttgcttatctggcttctccacttcagtgcaagcttcctgagaccaagggcctcctgccttgttcactgcgttaccttccccctgtactgagaacatgtttagcacataaggtacttcataaatgttttctgaataactggaatagtggcacttatcacactgcatagaaaatgcctattttgtggtttgtctccattaaacataagctcttgaggatggcaactgagttttggtaacttgtgtcttctgaacactgctgagtgtctatgacatggttggcactcagtaagtagttagtgaataaatggatagatgaatctgtccattttatccctggctttggagatcagaataacaaagcaaggggttatccagttaaatgatgtgcagatgtttcaaaatcagtgtcaactgagccaggggtcaacaaatctggtcagcaggccaatctggataatgatgggctttgtgcagctctgaagctaagaatgatttttatagttttaaaaggttgtaaaaaaaaaaaaaaaaaaaaaaagagagatggtatgtgaccagcaaacttgcctttacaggaaaagtttgctgatccctgagaagtcattcccgttccctttttccagtggtggaactgtaaaaacaactaactctctgaactaattccctctctgaagctccagagtggaagaggctaagttgtgccactggaagaatggggttaactcaagccctaaaagtactaaccttggctgaactcatggggcacaagcctatgctcaacaaaacggatgaaccttacccagtgtccactggtgatgtagtgctattcagataccacctctggtagatggcttctaaggtcagtgtctttgtggaatcactgtggattcagttggaagtgaaagtgcagcctgctgactccgtattcatttcagttggaggtttgctcttctgccgtgttcatgaagatagtttaggaaatgggtgtttaactgatcacaatctcgctgaaaattgctggcattcataccatctcaggtgaggttactctaaccacacaagtacttacattggcacactctacttagtggatgacagagaagtcattctacctaaagatagagaagtctatctctgtgaatgacagagatgtcattctacctaacatctctgcagtttgtagaaaaactctttatagagtttgtagacattgaagcagcagtctccagcttttgcacttaccctaagtctgtaaatgacattgctaagacctgaggagactgaacaatgaaaagaacagagacggggggcctaagtagtgtcctcccactagaaatcagcttgggctggctgggtccctcccaggggtctgacagggacaacagcgattatgtctgcggtggggagggacactgcaggccaccaggtaaaagactgggagcacagaagacaaatgatggggaggcagcagccatgggccacctggtcaggcctgatcagatggaatcttttgtaggggcagttctgtcctaggcagctactgcctaggttctgagagtggaagctctcaccactccttctttccagcaacagtgcaaatctcagatgctgggtgtttccctggcagttcaccagagaccaaggggaaagaatcaaagtgaggcacagaatgccctcaatcagtggttcacagtgcagaggagtgggaattggatttttcttcccagagggcacttggtaatgtttggaggcattctgggttgtcacagctgggccagggggagctctgctggctgttaactgttgcttccaggtcaggtgcagtggctcatgcctataatcccagcacttcaggaggctgaggcaggaggatcctttgagctcaggagtttgagaccagtgtgggcaccatggcaaactctgtctctacaaacatttttaaaattagccaggtgtgatgacacacacctgtagtcccagctactcaggaggctgtgggaagactgcttgagcctgggagatccaggctgcagtgagctatgatcatgccattgcactccaccctgtcttaaaaaataatgataaaaatttttaagaaagggaattaaagggaaattaggaaattgtgacacagaagggcaagataagaatccaacaagagatcatgaaggacattaaagagagaaaacaggatggactaaaactaagcataagtcactcactgaattaaagagatcaagcgcctgaatgtggagaactgggggtgtggtggggagtatacagagtacttgatgtgggagtaactttcagaagagtgagtcaaatgtggctttctttctctctctttgcctgttcaggtggtttgatagctgtggtttataccagcatcttgaatgctgacattatgctttggggatcagtcatgttaataggctttgggaagtaaaacaagatgactgggtaccatggtggaacctttggctctagagctgcctgggccatcagcatctttgtctcacagatgaggatgatacagaaggactgggctctcggctaaaccccaaccttaaccctggaaccacagctctaagtgaaaacagctgaccctgtttttccacccaaatgttgcctttttggcctgctccacccctatcctgtgcccataaaaaacttcagaggcagagcaacacaaacagctgagtgtcaaggtataagcggctgagtgacagacaagcaactgagcgtcagagactataaaaaaacacagctaatttcagacagtgcagttttggagaagggtctgaccagaaacggttaggctttaggaaaagatcactttcccatcctttttccagccaagtgggaggtgccagccatctggctacatgggacccctaacccgaggcttccctggggactgggaggtgtgcgcagctcattgctgcctcgcttagcccttgaacatggcacacgcatgcagcagacacgcccaggctcctaagcagggaggggagggggtgagcagaggaaccaccacacaccatgcctgcccgtggctgttggggtgagtgtggggatggcacctctaagaaaaaacgggaatcacattgttctgaattccatatctaatggctaggccaaacactcattctacctaacatctctgcagtttgtagcaaaactctttatgagagagatagaagccagtcaggcacggtggctcacgcctgcaatcccagcactttgggaggccgaggtgggcagatcacctgaggtcaggagttcgagaccagcctggccaacatggtgaaacccaatctctagtaaaaatacaaatattagccaggtatggtggtgggtgcctgtagtcccagctactcagaaggctgaggcaggagaatcacttgaacctgggaggcggaggttgcagtgagccaagattgcaccacgcactccagcctgggggacaagagcaagactccgtctcaaaaaaaaaaaaaaaaaaagaaagaaagaaagagatagaaaccatttgcaggcattaaagaagaaaagatacaaagatatcacagcaaagtctgcagatttgggccgacgcctgttagggcagtcatggatggagtttagtcttggggccttccagcaacactgaggagtggcctcagtcagatgcctttggttccccaggaccttattcccatcccataagacagtttgaccaccgtgaaggaaaacagccacagagccaacattcttttcacccaaaagagacatttcgtcatgtactcacttgtctgacgtatccaggacaagccttcagatgagatgggatagttcccttgatccccttcatgggcagaaactggagtggctcatttcactcagcccggcgttggccactcctcacaggagacagcatgcaagcgagagtgtgcaggaaccagaatgaacaaatgctggaaccgccaatcactcctctctgctaggagcaggttctgtgcgggccgagtagcgtcgtccaagcatgttacaaccaatgctgtttcagctcttatgtctggaaacagccaagtgccaaccggcttggtggagggtcagggtggcagcccctgccctctcagcacctgggttcttgtccaatgtccaggaagaatcaggtcacatgaaccatttgaaaggggatgcatgtggaggaatttattgggtggtgggtggctctcagcagaaacggaggctggaaacggaaggggatgatgggaaggggatctttccctgaagcccagccatctccagccaggcccctctccacaaagctgcaccatctgaagttagctgcgtctgtccacagtctctgatgctcagttgcttctctgattgccgctcagctgcttctgttgctctgccggctgaagtctttttggggcacaagataggggcggggcaggccaaaaaggcaacatttgggtggaaaaacggggtaagctgtttcacttagggccacagttccaggattcagcggggggtttagctgggagcccagcccttctgtatcaaggagactgaagcccaaacacaacccaacagcattgttgaaagtcatgctgaaagttggggaggatgtttctgctcacttcaagagaaagacgagtcaaagcatgggagtggaaatgacaaactctagtgctttggtacactacactcctcctcacttctgggccgtcatcagtgttcttccctagttagaaggccaccttctttttcaccactcaattaaatctatccaccaaggtcaacagaagatccacccctaaagatataattccaccattaatccatcaacacagccctcttctctggagctcacatcactaccacacaagtcaacatatttaaacacataacgtaattgtttattgagtgtttcacataaataatcatactccctacatccaaaacttctgaagaaccagaaccatggtactccctatgcaaagcactgtctgatgcattaagtagattcatgcatcactaaacggccaggacacattctgagaaatgtgtcattaggcaatttctttgatgtgccaccatcatagagtatgcttacataaacctagagggtgtagcctattcctcctaggctgcaaacctgtacatgttattatactgaatattacaggcaattctaacacaatagtatttgtgtagctaaacctaaaaaaggtacagtaaaaatatgatataaaagataaaatgtgggctgggcacagtggctcacccctgtaatcccagcactttgggaggccgaggcgggcagatcatggggtcaggagatcgagaccatcctggctaacacggtgaaaccccgtctctactaaaaatataaaaaattaaccgggcgtggtggcaggcgcctgtagtcccagctactcaggaggctgaggcaggagaatggcatgaacccgggaggtggaggttgcagtgagccaagatcgcgccactgcactccggcctgggagacaaagcaagactctcaaaaaaaaaaaaaaaaaaaaaaattaccatgaacttacacgtagactcatggaccagaataaagagctgagagagagactcctgtgtttactgaatttttttttttccaagacggagttttgctcttgttgcccaggctgaagtgcaatagcgcaatctcagctcactgcaacctgtgcctcctgggttgaagcgattctcctgcctcagcttcccaagtagctgggactacaggcgtgcaccactacacaccaggctaattttgtatttttagtagagatggggtttcaccatgttcaccaaaccgaaatttaatatatattcaagcgggctcaacaagtcaatgagggagaggctaactctttgatgatgctggaaaaaccagcttacttttggagtaacaaaatttcatgtctccctaacacttaaacaaaggtggccttcagatgaattaacgacttagtgtgacaaggaaaactacaaaagaaaggaatgttagagaatatttttgagacagcgagggaagtaatcatatcagtttatcacgttacatataaggcctttttttcctgagacaagctctcactctgtcacccaggctggagtacagtggtgtaatcacagctcactgcagcctcaaactccccggctagcaatcctcccacctcagcctcccaagtacctgatgtgtctggaattggtgggttcttggtctcactgacttcaagaatgaagccgtggaccctcgcagcgagtgttacagttcttaaaagtggcgtgtccgcaggttgttccttctgatgttcagatgtgtttggagtttcttccttctggtgggttcgtggtctcgctggctcaggagtgaagctgcagaccttggcggtgagcgttacagctcttaaggtggcacgtctgcagttgttgttcctccggctgggttcgtggtctcgctggctgcagaccttcgcggtgagtgtcatagctcataaaggcagtgtggacccaaagagtgagcagtaacgagatttattgcaaagagctaaagagcaaagctcccacagcgtggaaggggactgcagcaggttgccactgctggctggggcagcctgcttttattcacttatctggccccacccacttcctgctgattagtccattttacagagagccgattggtctgttttacagagcgctgattggtccgttttgacaggttgctgactggtgcgtttacaacccctgagctagacacaaaaagttctccacatccccactagactagctagatacagagtgtccattggtgtatttacaaaccccgagctagacacagagtgctgattggtgcatttacaaaccttgagctagatacagagtgccaattggtgcattcacaatcccttagctagacataaaggttctccaagtccccaccaaattaactcgatacagagtgccgattggtgcattcacaaaccctgagctagacacagggtgctgattggggtattcgcaatcccttagctagacatgaagattccccaagtccccaccaggctcaggagcccagctggcttcacccagtggatcccgcgccggggctgcaggtggagctgcctgccagtcctgcgccgtgggaccgcactcctcagcccttgggcggtccatgggactgggcgcggtggagcagggggcggtgctcgtccgggaggcttgggcagagcaggagcccacggcggcggggagcgggggaggctcaggcatggcgggctgcaggtcccgagccctgccccgcggggaggcagctaaggccgagcgagaaatcgagcacagccgctgctggcccaggtgctaagcccctcactgcccagggcccggggggcctgccggcgggccgctgggagtgcggggcccgcccagcccacgcccacccggaagccgcactggcccgcaagcacgcgcgcagccccggttcccgcccgcgcttctccctccacacctccccgcaagctgagggagccggcttcggccttggccagcccagaaaggggctcccacagtgcagaggcgggctgaagggctcctcaagcggggccagagtgggcgccaaggccgaggaggcgcccagagcgaccaaggggtgggagggctgccagcacactgtcacctctcactgaaaccgcaggtgctcacaaccaggcccggctattttaaactttttttttttgtagagatggcatcttgctatgttgcccaggctagtctcaaactcctggcgtgcagcaaatctcagcctcccaaagtgctggaattactggcaggagccaccatgctcagtcagtaagaactttttaacaaagaacactataaacaaagttgtcagatgacagattagggaagattctcagaaatgtttataatggacaagacactaatagtaaaatcaacaagaaaaatgagctccaatagaaatgtgaacaacagatgatgacaatttacagaaaaaggacgaggcgtgtggagcacaaggtcaggagttcgagaccagcctgaccagcatggtgaaaccctatctctactaaaaacacaaaaaattagccgggtgtggtggcgggtgtctgtaatcccaactactccggaggctgaggtaggagaatcacttgaacctgggaggcggaggatgcagtgagccaagatcgcgccattgcactgcagcctggccaacagagcgagactccatttcaaaaaaaagaaaaaggaatttcaaacaagcgtaacttctaacaagcacataactcagaggtatcagggaaatgcgatttgaagccacaatgcacctggcaaaaatgagaaaggtctgtaacaccaagcattgaggatgcggatgtttagggaccctcgtgcagttctggagaaggtctagactgcagctgtctgttctagggggcaatctgggaggatttaataaaattaaatatattgtactccattacctagcaatgatgttccccagaatctacctaaaacatcctcacaggagttcataagagaatatgtgtgagacattcatcaaatgttgattgtgtccattactgtaaagtgggtagatgacatgaggcggaaacattttggagtgttatgcagcggttacaaacaataggctagatgcaccctatggattgtgaaaatgtactgagtagaagagcgagaaacaagatgagatctggagcacaatacgtgggtattctctataatgtcgttatcttttttatttgtttgtattctttcccatctatttgttgtgtttttattgtgctactttacctagaaaatttttaaaactttctatgtttttctttttcatttcttctataaccataactggaaaagttgcctctgagacttcatgtctgacaataagtgaacttcctgaactacctcccaattaaacacctaggaatgccgggcgaaatagagaaacattttttaatagtcacagaggagctcatcagaaaggaagaaaatctccaaaggctgaaaacaaagaaataactgaaatcaagagagctaggctgacagtgatgctaagggtgcactggtggcatttaccaagcttggtttccaaagtcttagatttgagtggccaagtgagaaaggagaagggccaaacattcatgagtgagtggtgaagagtaagccctccagtagaacttggattcttttttttatatttatttttttattttattttttgagacggagtctcgctctgttgcccaggctggagtgcagtggctcgatctctgctcactgcaagctccacctcccaggttcatgccattctcctgcctcagcctcccgagtagctgggactacaggcgcccgccactacacccggctaattttttgtagctttagtagagatggggtttcaccgtgttagccaggatggtctcgatctcctgagctcgtgatccgcccacctcagcctcccaaagtgctgggactactggcgagagccaccacggctggccttttttgttttgtttttttgggagagtctcactctgtcacccagggctggagtgccttggcctaaagggctcactgcagcctcgaactcccaggttcaagcaatcctcccacctcagcctcccaagtagctggaactacaactgcacaccattacacctgggtaaactttatttttttttatttttgcagacatgggggtctcatatgttgctcaggctggtctcaaactcctgggctcaagtgatcctgccacttccatctcccaaatttctgggattacaagcgtgaagaacttgaatttttgaaaggtctcagtgggctaggagaaaatctggccactagcaaagagaaataacaatagaaaaaaaaagtgccttaacctgggctccaggagatggaaaaaagtcttctctgagaattcataatggtgagcctgctgtcctatatatttgggttttttaaaatttaactttatggtaaaccccatgtgaacaagtaaacataaaatcatctaaaatttggccgggtgtgatggctcacgcctgtaatccaagtactttgggagaccgatgcgggcggatcacaaggtcaagagatcgagaccatcctggccaacatggtgaaagcccgtctctactaaaaatagaaaaattatctgggtgtggcggcacacgcctgtagtcccagctactcgggaggctgaggcaggagaatcacttgaacccgggaggcgaaggttgcagtgatccgagatcacgccattgcacttcagcctaggcaacagagcaagactccatttcaaaataatagtaataataataataatctaaaatttgttatactctggcctggcagggataatggcaaattctgtctgcggggatgcaagcttgctgtaattggaatgcttacatcccttccaaaatttacattgaaacttaatcttcaatgcatcaggagtaggaggcagggcctttaggaggtatttaggccgtgagggctctatcctcatggatggtactactgtcttataaaaatgctggatggaactagcaaggcccttttttccctcctgtcccttccaccatgtgaggaaactgtcttcaaggcaccatcatggaagcagagattgggccctcaccagacactgaatctactgacattttaatcttggaccttccagcctccagaactgtgagaaataatttctattgtttataagttacttattctaaggtattttgttatagtagcaggaacagatgaagacagccctcaaccaaaatcttgcatgattcccataaataaattgctgctcaagttaagccctcaacccaaaattagaagacatggaagaatgaaactaccatgaggaagaatcagtacaatcagttaccctcaaatgtcagaaaattgaagtgttagatactaaacacaagaaataaaagtggaactgaaaatattaacaaaattttgtcagacaagatcagtcagacttgaaaactcaaacctctaaaagtggaaaatagatttattgaaatgtcaaattcagtaactgattaaatagcagattacacacagctgaaggaaaaaaattagcaacctggaagatataactgaacaaactccccagaacacacacaaaaagtgtaagtgtaaaagagaaacaaagtgacatggaagactaaatgagtatcaaaatacatgtcagtggagttccagaagaaaaggaaagagaagcaatatttgaagagaaagtggctgaaaatgttcataatttttgaaagagcaaaaatcatcagaaatcacagagcagcttgatagtacattttaaaataactacaagcttgtatttggattgtttgtaacacaaaggatatatgtctgaagggatgaatacccctttctccatgatgtgttcatctcacactgcatgcctgtatcaaaacatctcttgtaccccataaatatatatacctattatgtacccacaaaaattaaaaatagaaaacttttttaatttttgaaaagaaatcacagtgaatctgaagcataaataattttatttatttattaacttttattttaaatttaggggtacatgtgcgggtttgttatacaggtaaactcatgtcacatgggtttgtggtacagattattaacacccagacattaagcctagtacccattagttatttttcccaatcctctctctcctcccactgtccaccctcaagtaggccccagtgcctgttgtttcttctatgcgtccatgtgttctcatcatttatctcccacttattagtgagaacatgggtatttggttttctgttactgtattagtttgctgaggataatggcctccagctccatccctgttcctgcaaaggacatgatctcattcttttttatggctgcatagtattccatgatgtatatatgttgcattttctttattcagtctaccattgatgggcatttaggttgattccaagtctttgctattgtgaatactgctgcagtgaacatacaaatgcatgtgtctttatggcagaatgattcatattcctttgggtatatacccagtaatgggattgttgggtcaaatggtagtttgggttttaggtctttgagaaagttgccacactgctttccacaatggttgaactaatttacactctcaccaacagtgtataaccattcctttttctccacagccttacaagcatctgttatttttttacatactctgatgggtgaagccacaggggcagagcaggcaacttccatgggaggaatttgctgccgtgcttccgacaaggtcaaagtgtagaacactttctattgctaagtaatgtgcaggagacatctctaaccctagctcatcttttaatctgcccctgagacatgcctatttttaaatacaaattcctttccagttttaacagagaggagcgctctgtttccatgttcccgggtttggtcttcagctgtcaggcagccctttgttaggtatctaggtggtgcttcctcacgggttaagaaatagctccctggcagggccgggtgcagtggcttacacctgtaatcccagcacttcaggaggccgaggcaggtggatcacaaggtcaggagatcaagaccatcctggctaacacggtgaaaccccgtctctactaaaaatacaaaaaattagctgggcatggtggcgggcgcctatggtcccagctactcgggaggctgaggcaggagaatggcgtgaaccccagaggcggagcttgcagtgagccaagatcgcaccaccacattccagcctgggcgacagagcaagactccgtctctaaaaaaataaaattaaataaaaattttaaaaaattttaaaaagtactgagcatttgtagcctctagtcagttctttaaaattttcagcaaaatttaataaaatacatatatgaacttaatttgttgaaatcttttatatcatgtgctatacttatctctctgaaatttttaaatatattacccctcaagaaattaatatttgccatgtattatgtgttttaagcctgactgccccaaacgtaccctccaaatttgctgaaaattcatccattatccagtaacaggcaaacagacacttggttttatttgttcagaagttgaagtgtttttctatgtagctcagtaacactcgtttgtgtttaagcatatggctgtcttctctgctcccacacttaaaatgggcatctgaatttaaactagggaataactaaattaatagcttatggtttgtagatattttattggcaagaagaaaaaactcaccaaattgtcattgactgttggttcaattcactgtttttttcttacagtcttacttgtttccctgttgcatccctattatggagatgagttaaagagaacaattgtttgcacacgtgcaggcatttaggagttacctgatgccacccactatggtagtctccctgcttgctgttacaaaccaaactaaaatgttaagccctccaactgactgatggaccccccagccagccaagggcattccaaagtaaagctgaaaaaccagttcaggctattatggaaagtggtgggggtcggggaaaggtgggacatacctcattatatcatcctgtctttggaattcatgcacaactgaccagcattatcattaaaagagatttttaagattggcagggcatggtggctcatgcctgtaatcccagcactttgggaggccgaagtgggtggatcacctgaggtcaggagttcaagatcagcctggccaacatggtgaaaccccgtctctactaaaaatacaaaaattagccaggcatggtggtgtgtgcctgtaatcccagctacttgggaggctgaagcaggagaatcgcttgaacctgggaggcagaggttgcagtgagccgagatcacgccactgcactccagcctgggcaacagagtgagactccatctcaaaaaaaaaaaaaaaaaagattaacagtatagatttttttgtagcaataagacaccagattccagcctgacactagtatagcatcacatgatggatagcaggccctgagacaaaccaaagtattttatccccaaaatatatttatttgacatattttgaaatgaccctgcaaagctgtctctcatgggggaaatctgaactctgtagagaattccctgttcttcacaggtctttcccttgatccaggagaaaattatctaagagcctggcatgttttttggtctgataagagctctgaagcctgctacctggaggcttcacctgcgtgataaaaccttggtctccacaaccctttatctgaacccagacattcttttctattgattccaggtctttagataataactcttttaaccaattgccaatcaggaaatctttgaatctgcctatgacctggaagcccctccacctttcctgctttgagttgtcccacctttctggactaaaccaatgtacatcttacacatattaattaatgtcttatgtctccctaaaatgtgtaagaccaagctgtggcttgaccaccttgggcacatgttctcaagatatcctggggcagtgtcacaggccattggtcacccatacttggctcagaataaatatcttcaaatattttacagagtctgactctttttatcaacaataattggcacccaacatcgggcctcagagcccccaaaagagttgcccaaatctgaagctaagggaccagcaggaacccactgaaatattgacttaatgaaattgcaaaaaggttttaatttttaaattccataatctctttctttttgaaatttttcaagttggtatctcaaaagttcaacttctgctgtacccctgctgcttcagctctttctttctttgagaaggcctgggatggtaacttttgtcagctcctgtgtgtgtgctcctataactttttttattaatagtctaaagtaagggagaggatttttgaaaacaggcaaatcttacaggatctgccactgtctgtgtgtctgttatgtctacatgtttatatgtgccatgtggaagtgatgttttactaccaaactatataaaagagctctaatcagttggcttaaagaggccaggcacagtggctcaggtttgtaatcccagcactttgggaggccgaggcgggtggatcacttgaggtcaggaattcaagaccagtctggccaacatggtgaaaccccatctctactaaaaatacaaaaatcagtctggtgtggggcgcatgcctgtagacccagctattcaggaggctgaggcaggagaatcacttgaatctgagaagcaaaggttgcagtgagccaaggtcaggccactgcactccagcctgagcaacagagtgagactccatctcaaaaaaaaaaaaaaaaaaaagaaataaaaagaaaaaattggcttaaagaaaagtaagtgcttgtcgactaacagacggtagctcagatgccttttacttcacatgattttagtaatctttggtaagattaacttggcaaattgaagctcaaaattgtctccagttcttaagaaatttaaagtcatgttatgttaaattaagtaatcctggattttccactgggaatttggattactaaaaattagaatagttggagaataagatatgtttttggtgaggatgtaaaaacatgaggatatggttttgctaaagaaaatgtatttttttctagtttagagaccatttaagggtcactttaaaataaaatttaaaaaaaattgtttcactctgttgcccaggctggagtgcagtggtgccatctcggctcactgcaacctccacctcccgggttcaagcgattcccctgcctcaacctcccaagtatctgggactacaggtacacatcaccacatctgactaatttttgtattcttagtagaggtgtggtttcaccatgtttgccaaactggtctcaaactcctgacctcaagtgatccacccgcctcggcctcccaaagtgctgggattacaggcatgagccactatgcatggcctaaaataaagaaaaaattatacagactaaatggataaagagaaaaataaaagaaagggtggagaatggatgtggtcacccatcttaaggagctgcagctgtgctgcattcagttactaaaagttagcagtagaatttaaagatggatcatgctcccaggaagttggttcactggatgcataaggaaatacaagctataaccacaaaataagtgatagaatttttaaaaataaagaaaatgcaaattaataaggaagaaggaaaatatttaatcccttggttattgttatctgtaatagctgagatgaaaacaaaagagagtgctgggttgggccttaagactggcccaagctcagatgtgggtctctctcagctcaggccactagcctcaaagtgaaacgggaaaggttcccttgtccccctctcagggcatgcaatgggggcgtggctcatttcttcagtgccccactgctcaaacctctaggggagcatacagacgggcagcctgtggggctcccaccccacagcagtgtctaggggtgaatgtttacagctgaagccccagtgggcgtgtgttacagggtgctctgttacaagtttgcggcctataggcggcttgtgtaaaccctctcaattaggccctctaccttgtcacaaggacagagggctttctgtatcctgggttcttgccttagtataccggaagaatcagatcacacgtgggcttggataatgggtgcaaggttttaccgagtggaggtagctctccactgatggaggatccagaagggagatggttttcccctgtagttgggccactcagcagccccggctctcctccgactgctccagccaaactccgcattgttctgcttgtcatggcctgccagcaagctggcatctgccagcgtgctcttccaccagcgtgctcttccaccagcatgctcttccaccagcgtgctccctcgacgtcctcttgccatccagctgcttgtgtcttcttccggtgatgtgctcctctcaatgtctggctgcctgtgtgtttgcctgctagggtcttgggtttttataggcccacgatggggacatggcaggccagggtggtcttgggaaatgcaacatttgggtgcaaaggcaggagtgcctgtcctcacctaggtccatgtgtgttgagccccagccagggaccacaccctcctctacccagcacttccctttcccttttcatttaaagggaccacgctcttcccttcccagcactcccatatcaaaagctacccacaaatggaaacattaagccagggtgacaaaaggtacctctgaggtatgtaattaccaagaaggtagtcaatgtaggggaagggcaaaaccaagtaactattaaaataagagggtataatataaagaaattgtaccatttggtagattgatatcatcagcttcctgagaaacctttgctaaaatggactgtaagaataactactttaaggacagtatctttaattttaaatgctacagaatgaaagagcatctctgggttgatgcaggacccatagctcactattaaacaattgcggctgagtttatgtgatccaaatgcccaggaggttattcctgagcaaatggccagcctagtgaactggataaatgcccatgtaagatctgtttaccctgagaagggcatttcctaactctccctataaaatgccaagtggagcaccccagatgaaatagctgatatgctttctatacaagccatctaggactggctttatcatgaccaggatattcacccactgaatatggctattacccaagttatggtaaatgctgtagttaagggggtcccttccacatggacaccccaggttataaccagaaagggttcccaatctagactccaagagagggttcttagacctcatgcaagaaagaacttggggcaagtacataaagtgaaagcaagtttattaagaaagtaaagaaacaaaaaaatggctactccataagcaaagttatttctcacttatatgattaataagagatggattattcatgagttttctgggaaaggggtgggcaattcctggaactgagggttcctcccacttttagaccatatagggtatcttcctgatattgccatggcatttgtaaactgtcatggcactgatgggagtgtcttttagcattctaatgcattataattagcatataatgagcagtgaggatgaccagaggtcacttctgttgccatattggtttcagtggggtttggttggcttttttttttttttaaccacaacctgttttttatttatttatttatttatttatttatttatattttttatttttttttagatggagtcttgctctgtcacccaggttagagtgcagtggcaccatctcggctcactgcaagctctgcctccttggttcacgccattctgctgcctcagcctcccgagtagctgggactacaggtgcctgccaccatacccggctaattttttctatttttcagtagagacggggtttcaccgtgttagccaggatggtcttgatctcctgacctcgtgatctgcccacctcggcctcccaaagtgctaggattacaggtgtgagccaccacacccagccacaacctgttttttattagcaaggtctttgtgacctgtattttatgccaacctcccatctcatcctgtgacttagaattccttaacctcctgggaatgcagcccagtaggtctcagtcctttttcttttcttttcttttcttttttttgagatggaatcttcctctgttgcccaggctgcagggcagtggcacaatctcggctgtctgcaagctccacctcccgggttcaagcgattttctctgcctcagcctcctgagtagcagggattacaggcacccaccaccaagcccggctaatttttgtattttttagtagagacagggtttcaccatgttggccaggctggtcttgaactcctgacctcaggtaatctgcccacctcgacctcccaaagtgctgggattacaggcgtgagccaccgcacctggctggtctcagccttattttacccagcccctctacaagatggagtcactccacttcaaatgcctctgactaagtgacattacttctgcagaacaaatttgctgttcttcatgggtcttgcatatgctaataaaacattcggcttaaaagaaaaataggaaaggcaaatgggagtcaaaagactcttctaagatgagtggttattaagaaatgaaataaaatgaaaattgatggggttaaaacaaacgtctttacaacactatcaaaggttataatagctttgatagtggctattatatatagcttggctataatagtcctctaaagacaaaccaggttacaattcccttcctgatgtttttagttgatgccctaatggaataggtttctttttctgttctgacacacaagttctcttctgattgtcaaattattggctaaagggagcccctgctggtccccaacattataaagcccgacaccagtttttagttttctgctttctgcatttgctccagattggagaaatttaagaaaaatcaaaagacacggagttaaaatgagagagctgacattgcctggggcaatgttgaggcaaattacgataatgattgacaaaagggcctgaggcccttcacccagcccccctgctggaaacccagattcactctcaccagggaagataaaacggtctgggatagagaagaaatgttcctagaacaagaacgtaaaaatataagggacctgaagctatccctgcagtaatggaaataatgatgcccaaaagagttccatgagaaaacaaatggtttacgtaagatcttgcttcctggaaaatgcaaggagaagatacttgcaagcagggagcttcttttcccccttagaattaacactgcatgaggagctgctagattctacagtgcttgataaatagctcttccctgactgacaaagagctgcttagtttgcggatggccgttcctaggtgaacaactgacatcctatttggaaggctgctactctgattgtgaagtatacttttatgaacagaatttacctttcttgctacctgagttcccctaaattcggtaactattcatgagtatccttattttatggcaatatacttgtttgcataagttcggttaagaggacacaattggagacactggttattttaccaaggctttgactaaataatatatttttaggagtcccagcaaagccaacttgaaaagagcctatgtggccaatcaattcttgttgaactttatgcacataattaggccaagtataagcctaaaacttaacttacacacaaattggccttaccatgatttctctttagtggaaaaacagggctagagagagaaaaattatgtttcaaaaggaaaactattcacacacctgttactagattgcagccctgacctttgtttctgagcacagattaaatcatgaattatttcttggctataacagtcctctaaagacaaacaaggttatgattttctttatgtttttagttggcattctaatggaagagggttatttttctgttctgacacacaaattcttttttgatggtcaaattattgttatttagctcacatagctttacttcttctgaggaaaccagaattatggtattctgaaggctagagacaatttgacaaagcctgtgaatctccctcatttgagatcctgctgggcccgatgtgtttttcactgccaatgccctgctgctaaaactatacaagcacctggctgggcacggtggctcacgcctgtaatcccagcactttgggaggccgaggcaggcggatcacaaggtcaggagatcaagaccagcctggctaacaccgtgaaaccctgtctctactaaaaatacaaaaaaaattagcagggcgtggtggtgggtgcctgtagtcccaggtacttgggaagctgaggcaggagaatggtgcaccgatttccacatgcaaaagaaagactctgaaaccctacttcacactatgcacaaaaagtcatttaaaatagatcaacagcctatgtcgggcacggtggctcatgcctgtaatcccaccactttgggaggccgaggtgggcagatcacgaggtcaggagatcgagatcatcctggctagcacggtgaaaccccgcctctactaaaaatacaaaaaattagccgggcgtggtggcgggcgcctgtagtcccagctactcaggaggctgaggcaggagaatggcatgaacccgggaggcggagcttgcagtgagccgagattgtgccactgcactccagcctgcgcgacacagcaagactctgtctcaaaaaaacaaaaaaagaaaaagaaaaagaaaaagaatgttaagggttgatgaatgcctgtccacctttattcctgtctggctcagaacatttaaattatgtcttttagctctaagtctcttggctgtaggagtcccacttagagacagaagggacccatggcaggcagccacaccaccccagcaatgctgtgggacgaaataaaagtttggtggcttgctgttttctctgggaaatcttggccagaaggaggagaatgtaaaccaaaaataaaattctaagccctacaacttactgatggacacccctcttaaccaagggcattccaaagtaaacctgaaaagctagttgaggccatggtgggaagtagaggtcagacatgcttcattattccctcctctttttggaattcgagcataactaaccagcattaacattaaaacagagatcttaagactgacaatacagacttcttgtagcaataagacatcaaattcctggctgactctagtatagcatcacatgacagatggcaggccctgaaataaagtatgttagccccaaacatgcttctttgacatattttgaaatggccctgcaaagctgtctcttctgagggaaatctacattctgtagaaagtccccttcccttgccaggtcttttctgtgacccaagagaattaactaagagtctggcaccttttaggtctgataagagctctgaagtcttcatctacatgacaaaaccttggtcaccacaataccttattttaacccagacattcctttctattgattctaggtctttaggtaataactctttaaccaattgccaatcaggaaatctttaaatccacctatgacctggagcccctccaccttccctgctttgagttgtcccgcctttttgaactgaaccaatgtacatcttacatatatggattgatatcttatgtccccctaaaatatataagaccaagctgtagccccaccaccttgggcacatgttctcaggatctcctggggctgtgtcatgagccattggtcacgcatatttggttcagaataaatcttttcaaatattttgcagagtttgacccttttcatcaacaccatgttttgcaagagagtcattgagcaggtgggtgttggcatggccaccgcatggaccagggtgatgggttgccttcacattgtagttgtctttgcaagtgttgccctagaaggttctatttcacctcatgggtttacaccctggcatcatttgctttctgagacatgattgtctccaggccagggttgatccaagctccttcttgctcatggaggcagagagctcttatttgttttcctccctttgtagtgtaatctgcttttagccatgccatagattatgcaaaattgtaaatggttctctctcacacaatttggctgtaggaaaatattattctgtggcctctgtacacggacgcgtcatgcttagagatttcatgcccacagggtatgcatagcagtgggctccttccaccttccctgcaatgaggaggtaattatttgaccatctctttcagccacacttaacaccaaagatcccaactaatggctcgatattttatcaataagactgaaagtgtagcttgtcagatattttctttctttttatttttgagtcttgtattaaatcttgtttcccctaacagcactgcatagctgggcatcgcaaaagcacagcaccggaggctctgtgatctggtcctgcctgcctctctggcctcactctctgcatgcacagccctaggtcccagccactccaaacgctcacagtgctgattactgaattgtcgtgtaccttctctggcctttcttcattggcagagactgttttctttgccagaaatatttttttactcctccacctggccagcgcttcctcccttgagttcagtcctctaaaccaacctgccagtgctccctgcaccacccaacttaacaggactcagcttagcaccatgcatgtggaaggagagcactaggcttcagggatgccagagctgcctctctttgctctccctgggaagggcatgagcaagagggcaggcagtaatgggactctgcctcccacctgggatgccagcctcagggtattggaacctatcaccacagaaaactggaggatccagtcagtggctctcctgctacccatggtctgaagttgcgggcacattgcacatactttcctggattagagaactctccaagccctccctcctgccctgcttcagagagcatgccaatttggcttctgcccatctccagcaatggttcctgtggatcctctgcctagcaacaggatttaccaatggatcagtggcagggcagaatagaaaggaaccagggatggctcccagaggatgttttaccttaagcaaccagagagatgaaggtgccacatagacagatggaaaactgttatttaggacacatttggaactcagctagtcaggggagcaaggatgaaaatggtttgtctcatcacccaccttcctgccaggtgactccggtgggctcctctttggtagggtgccttctggaggctgacttgtgggatggtgattggcttctttcaattgggggtccatcgggcctatagcccctcgagctgcatggagaacagcaacggccctttgctcatctgcagcttacagcactgtctccacttcatcttgatgctgctcctggtcagtctcagcatgctagggatctccttactcacagacccaactcctgataaccaagtaattgctactaggtagggtgctctggggtggaccctaatagcactttggaaggccgaggcaggcggatcacctgaggtcaggagttcgagatcagcctggctaacatggagaaaccccatctctactaaaaatacaaaagtagccaggtgtggtggtgcctgcctgtgatcccagctactcgggaggctgaggcaggagaatcacttgaacctgggaggcagagattgcggtgggccgagatcacgccattgcactccagcctgggcaacaggagcgaaactccatctaaaaaaaaaaaaaataggggaattcctgcattctctttggaaagaggagggctgggggtggcactggagtgaattagaaataggagggtaaccctggaagggcccggcttaatgaaacaaagctgaactcacctaatgctctgcagtgatctgtcaattaggtgttcatttagatagagaagtttggcttttaaaatgcaaattttctttggaagtattaagttcaccaacctcagtatgcattaatgcaatcagggcaatcccagctgctacccacccagggggaattaagccaatggcaagggggaggggtggtgttgtgggcagctgcctacagccttctcctcatgagccatttcttacctcccaggaggcaggtgtcagtcacccctgttttgaatatttattacaaagtctgggttcagagaaattaagtaatttctccaaggtaacaaaactactaagtgtcaggcctgggccccaacctggctccagaactcatgctggctccaccaggttgttataagtttagataagtgtgaacagggcaggagagggctctcccctacccactagaaatgtcaggtgatggttcagcagttatcacattgcctctctaaaaatgataacgcaacagcaccagagagaggccatttcctgatgttccacacctgttaacagcaaaatgttaattgaatgcaggccccagggagaagcaacttcctgggcatgcaagttaggagacaaaaatggtgaagtatgatcttccgggggcacacgccactggaaaaagaaagaaagcctcagacgggcgtgcatataactccctaaacacagtgcgcatgctcaattccaaaggctaaggaaagcactgcgcatgcggaaagcccgcccgaagggcagaatcatgggaaagaggcaagctcataaaagtcctaggatcatggttaaatggggcacttgaccttctctctttaaccttcacatgtcctcctgggtctcttccaagcaccccttcctttctttcctgttctaaggccttttaaaataaacttccactcctgttctggaacttgcctcagtctctctttctgctttatgtctctcagtcaaatcctttcttctgagaaggcaaagactgaagttgctacagacccatatggataggccaccagtaacttggggtaactcggatcccttccatcggtaacaaagtcacccactttgccaacttagcaggacagggacttggccccaacagaaagcagcaggagagagggtcctgagggttcagccagcaagcaacagggtctgaggttcagggaggaccgcagaagggactggggacagaagacctgtacctttctaccagcttcacccagggtctggataaaaactggcacttggaagactgcaagccccagggtcccccagctccatcgtggggattttccctctggccaccccatttttctgctcagcattttccatttggttcattcctctcttgcacacatagccctgctggaagaggggcaaagcacatggggaaaggagctggctgctcacaccccacgtgattgccacctgcatcagtgacacacatgggagacttccctgctcctggcactttgagaagctgggggtgggtgactttctatttcctgttgctcagggtctcatccgttttctgtattcttttctgctgttctcttactctcaacttcttgatgttgctcacttcttgtttagtcagccacacatttttttgagtgtttcctacctgcctggctctagagaacacaaagaaagtagctgctgaagccaggcgcggtggctcacgcctgtaatcccagcactttgggaggccaaggtgggcagatcacgaggtcaggagatcgagaccatcctagctaacatggtgaaaccctgtgtctgctaaaaatacaaaaaaaattagctgtgcatggtggcacgtgcctgtagtcccagctactcaggaggctgaggcaggagaatcgcttgaacccgggaggcggaggttgcagtgagccgagattgtgccacggcactccagactgggtgacagactgagattctgtctcaaaaaaaaaaaaaaagaaaagaaaagaaaaaagaaagtagctgctgaaagaggaaggggagaggaagataaaaatgagtgtttatgggtcagtgacaacgtgccaggccctggtccactgtgcatggcacctctgctcaccactgtcagggaaggatgactctgtccccgactcaacgcaagctcagaagcccacaggcactgtgcaacccttggccctggctcttccagtgacctcatccacaggaagctgattgtgtccttgagaaggcaaaatgtgcacatatggcatcaccaggaagcaattaaaggctaagctgagtctctgtcatcaacacagcagaatctgagtcccagaattctagtctgagaggtggggctcaggctggggaggcagcacagcccagcagggctcctaaacatccctaccatggtttagcaggagagagtgtgggccagagcttcaaataccctccgctgaggctggggtaacaggttccaatgtatctactctcctgatcccagcccttaaaacaaaacaaaaccacaacaatcagctgggttttgttacttccccaagttcacagatatgtttttaggaagaggaaaaaatgacagaccagaagggaaagggagtgccccccttagggtccgcaaaggtgcagctgaactaggccctaggcccaggtgctggctcttctggactgagctagcaccgtctctgatgcccatagagggctctggaatgaaagcagctctggggctgccctgtcctgtgcatccacatgacagagcttctcccagcaccaccatcagaagtagaccccagcgtgatgggcagctgcttcccatatgaagaggttcacattcctgcaccctcagacggggaaagagctctgagcttattgcctccaactcctgcctcacagctgagggacactgagccccacagcagtgtgtcaccctttgccaaggtcacacaccacagggtgccagagccagaacaaactccagggtcctgattcctacactttcccatccacattccatcttgtgttggagtctaacaaccagatctcttttcagtcctttgagatcctggtgtccagctgtgggccaaggtactgtgtggtcttcatggcagggtcccaggtggtgacgcacccctctcctccctccatggctccaccagctctgttggagtttgtgcatcagccaagaggaaacggtagatcaggatgcagagacacaggggagcagaatccccatccccgcagcacagccagatgagaggaggttccaaagtcctgtgtgcagtactcagcaccccttggccccacactctgcaccctcagaaatgtccctccaggcaggggcccaggcattcacttgtcctgagacacctcatgggggtgttcagggcaagtggaggcacctatgagacagccaggtggaaccatctgggctggtgggacgggcatgggagaggacagaaaatgcactggtaggctcccagaggtgcatataagggaaacacaaggggtacgagggccaccccatgggaagtggaagagacagtgcaggggcagaaaagcagaagtactttgtttcctggaaatgttttagggagggggaggtggtgaggatccattgagggaaatgctgatggctgaagaaagatgaggcctgatgactggtagttgggttcctacacatggagaccacgttgtgccccacaggagcaatctggtggtgtggtgtcggggagggtggaggaattgggttacagagcctgtgcagggatttggaaccagagggctcctcagaacgggagaaggagatggtctgtaaggacctgttcgactccagtgagggtatgagggacagtgagggaggaaagcagtcccacataggaggacgcccagagtggggaagcaggtcttggggagagctaggtttcagtccgagcgagaagggagaggatgttccaggaacaggctgagaccctggggcctccagaaggcttgaaagaaaggtttcagcagatggggtcagaaaaggagtgttcagggccatagggggagggtgacctgagcttcttgcagtccctgacgcaaacagggataaaggacataatgagattagtcctgaatctgaggcagagagtgatgaggaggctgtgagtttgcgggagggaggggagggcctggctgggagaaggctgggttctaggttccctatagtcctgccagagaaagtcagagcccagagagtcaatggctccctcctgacacctgcacagggaagtgtacacctggccagggtgggtgctctgtagactgctgtggggtgagggagcagcttctcctgggcataggactcaaggcacctgcaggatgcagggctccaggctccctcagtgcctgctgatggctctcctctgagagggggtaaactggcttcctgggtacccacaatgtacaaggcacttgttctcagtaggatgcaccaggaactgtcagaagtatacctatatgtgacaggcatgattactaccccgattttagagctagggaaactgaggcactgagcagttaatcaatttgccccaggcccaatagataaacaatcagtgtagagctggggtctcaacacagcaggctccctccacagtgtgggctccaagccacactggctgtcctgctgccatcatccagccttggctatgtttaaaaagaaaaacaatgtcaggcgcggtggctcatgcctgtaatcccagcactttgggaggctgaggtgggtggatcacgaggtcagaagatggagaccatcctggctaacacagtgaaaccccgtctctactaaaaacacaaaatattagccgggcgtggtggcatgcgcctgcagtcccagctatttgggaggctgaggcaggagaatcacttgaacccaggaggcagaggttgcagtgagctgagatcgtgccaccacactccagcctggacaacagagcaagactctgttaaaaaaaaaaaaaaaccctcagccaaattaaatttaacagactttaattgagcaaagaatgatttgtgaatcaggcagccttctgagccagagtaggtttagagaaactccagtgcagccacttgatggaagaagatttatggacagagaaaggaaagtgacacagaaaacaaaagtgaggcacagaaatagccggattggttacagcccagcatttgccttatttgaacatggtttgaacagttggccctctttgattggccaaaactcactgatccgcaccagagtaggttacagtctgtttatacctccatttaagttatagttcactatgtacagggaaactatgagggcaaacttaaaaatatgttaggaggaagctttagactaaatttgatgtaatgattcccctctttcggtcatgctctcaattttgatagattgaccaaaactgtagtcattgatgtcactatcgccattgtaaacatacttatttggtctcaaaacctacggaaatagcagaagagtggattttgtaaggcgagaacaaggacatcaggttattttttttgtaagggttagagtagagagtacctcctcatgctggaatgtccagtttacaggagaaaaacaaaacctggtctgttctaggatatatttgtatctttaaagtcttagtttgattatatcaagtttaccataagtgactccattttggtttgatctgatctgttggggttagtacaggagctcagtctaaaacaatggtctttcataatctcgtttaagaattcctcccttttggtcacattctcacataggtgagagtctgaccaaaacttacagccttagcaccactctcagttaccatcattttgggtttccagtctcaacccatcattcataggttacagtgccctcatggtcatacatttatttgagctcttgtcattccagttgaagagacaccatctgaaattctagagatggctgcaagcaaatatttaaaacttttgagagaatacagtgcaccagtggggctactattatgactatcaacaggataatacacagagtttggagtatgctccttagccagggtccccataaaccaaaccacctaaaaccaaatagatcaaagaatgagctagatgaagagtctactcgctttaaccaagcagcccgttcattcatttcttacaaccaaatctctataatacctgatttatttctccacaggaaacaagaagtgccaccaactgcagagatacttctctgtttagccagtaaataatctagagaaattctgttatttagcataactttcacaagagaatgtatttactgattgattgattgattgactgattgactgagatggagtcttgctctgtcacccaggctggagtgcagtggtgtgatctcagctcactgcaacctccacctcctggtttcaagcgattctcctgcctcagcctcctgagtagctgggattataggcgcccgccaccatgcccagctaattttttgtacttttagttgaggcagggtttcaccacgttggccaggctggtctcaacctgacctcaggtgatctgcctgccttggcctcccaaagtgttgggattacaggcatgagccactgcacctggccttcaaaagataatttcaagcctgctgtgtaaccatggcctttacaatagaatctgctgtagagcctatcatcagggatacatttctaatcattgcctcatttactccaaaccatggaaaaagagacctaagaaatgatgcccatctagaagaatgaaggatcgtggaaatgttctctttagcatgtgatgcatcaataggttaagaggagtgaatgaatattctgcttctgactgcttatgaagcaacacatgtgccactaaaatttcttacctacattggccttttatcttccatctatcaagacataagtttgtccatgtataaggctagctgtaaaattcttcatttaaaagtataccccatgcgtgcacacaaaagacccccttttcactcctattgtttgcggaggcataagcaaggaaaaaattgaaagataagagtctcatgttagcagagaagtcttgattcatgatcttggaaaaaagctgtcctcatcaaggatgctgtctacttctggggagaaacttccctggttagctttacctaaggtttccaatggatgtacagttccaagagtctggaggggcccttatgagttgtgagattaaaaacccaagattcaagatctggaagttttgctgtagtgtggatggcaagtgcagtctttctccaattttctcagaaaattcaatcttcaggttctagattgtgaagatgttgattgtcctgtcagtggaccatgaaaagctttctttacctgaaaatacactttggcataatgacctactgttatatcagccctcttgcatgcacgaaaagtttttatacgaccagaaaacatgcactggaaatgacaatggaatgaaatccctctataaaaatttaaatgactctccatgtagcaaaaatgtacctgaagtttttattatctttccaggaatgtgggtttgacaaactaaatattggtcataaactattttagcaatttagaacagtcatcacatacacatatatatatttaatttgaatcattttatctctttcacgattagtcatggaatgcaaagcttttaataacaaaagctttaaggactcaggaaggatgaggtgggcatccaggttctccatgagtccacacttaacactgaacttacgtcctcttacataccagctgtttctccagtgtaggtgcatagcactgataactgataggttatcataggtaatttgacctggaccatggaattcatttgaactgcgtatctaaacaattaattgatttagcataaaaatctggcaaagtaccttcttggtattcaatttttttcctgcttgggtagcagttttataaaccagtcagtctctttattagagttcaggaattcttacccagtccaaatgatttgatctgaaagttatcagaaacctgtattcgagagtgtttgtcagggtccttttcatcccttcatgaaactccttaaagacaccatattctaagactttgtgtgcttgtgaagttttcagaaactgcatcagaattaagcaattaactgtggaaataacttaaaatggtcatagttaaagagacaatttacaaggaaatttggttatttctgtggcttataataatttaacgtaataaccataattatgactgatagcatacacccaaacattagaattctataaacgccatataattttggaatatatattaataacatagtcactaaaatataacttgaagaaggttaaacattatttcttatttgacaatgcctcccatgtagtttaacatgtcaaataattctatttatctttcttttggatgcttcaggagccttttttatcatccaaaagttaaagataaaaaatacttaattttgaaggtgaaatttgattttgggaagcctgtaaaatatgtcaaaggtttaaaacatgtaaccaaataagatcacaggctaccataaaataatagtcatttatttagccaaagtgataattaaaagatttttttaaacccaaaacctacactctttgatagaggatactcagttttccaaacagtcaagagacctgagaaagaccccatgagatagaatctgtctcttctcttctctctttttttcctttttgctgtttacttaaaagatgaacataaatattttactatgccttattgatactacacaatatttttgttcaaaagagaaaaccaaattttacttttgtattagtgtattatcaacactaaagctaatttttataaaatcttataaaaatttatcaaatctgtcatttttaactacacaagattttcataagccttttgctttacgttttctccccaactttctatgtttatctggttttatctattttttactcctcaatttgaaatctttagtaacttcaaactaaaaatttttaacaaacacatttttatgcctttaaaacttcctaatcaaggcataacttacttttgtttagatagtctttatacagaattgtttctctcatatctagtatttttaattacatatattaactataattttaactcttaataaccctaatttctagtgaaaaccactccaaccaaaaagtaattttgaactgttttatattagtatttgtagaaaaaattacaattttttagaaagatgtttcttcaaattactgtttattaacagatctaaatatgtttggcttttctataccatgttaataaaaatgtcaaggtatataggcttaaactcttgtttaataattaatatttcaggtcgggcaaggtggctcacgcctgtaatcccaacactttgggaggccgaggcaggcagattacaaggtcaggagtttaagaccagcctggccaacatagtgaaatcctgtctctactaaaaatacaaaaattagccaggcatggtggtgagtgcctgtaatcccagctactcaggaggctgaggagggagaattgcttgaacccagtaggcagaggttgcagtgagccaagaccacaccattgcactccagcctgggtgacagagtgagactctctcaaaaaataataataataattaatatttcagtattttaagtaataaatgactcagacattttgtgattatctgttactttggcataacatgactttaagatttttaattactaaaaagaattttgaaactataacccaagtaccatccctaattgttgtagaactcttagttcagctaaagatgggggtccttgtcacacggccacaaaaaaattaggctcatagacaatttgaaggatgaggatggcagggtttattgagtgaaaaggaaaaaagataaacagggattctccacaaagccagagttctgctagtgtgcttcccacctcacaaactgaatcccaggtaccacccaggaagaggaggggccaggctcctccccactgcaaatggcacgaacttctgtggctctcataacatctcccccaggtcatctggggtctcaagtaaccatgtagtaccaaggaggactatgaaggtcagggcctgtctgagtcctgaatttacataccaggtgtagaggccaggacagaagacagctgtaaagactgtgcctagaggatccaacccctttccaaaatagccagtaggcaagtagggaaagcagggaagaagggtcacatttggcttgattctgacttgtagctgctggtctaggaactgagaacatgtctccagacctcatcatggacacttattcacatccctaaatccagaggctctaaaccaaaaaaaaacataagttcacagtcaagtcaagcaggtatctaattatatttaactgataattgtgaactcattcctgtttcgccaaaaataaaccagctttatttatcaaatattatcacatacacataacacatatagacatacaaacacacaaaggcagatcttatagcttccataaaggatttttatttgacagatttcaaatagtttttctttcccccatacagactataaatcttccagttatctgtttcactgccctaagcaattgttaactaggcaacaaatttgcatttctaaagggacagctcttacatgaaacaaaaaaaaattatatttcataagcacagagctaagattttaggcataaatattgtatcatcatttgctcaaatcaagggaaaaaatggtacataagtgaaagttgatcaagataaagtggccagaaaagcaccttaagcaaaggcatgacttattatgtaaatttaaaacaacggcaagagtttctattgtacataggcagactcccttacaaatggaggtttcctttatagatgtaaatttcttttacaaaaggcttttaagattgccacttcaattccagaaaggtgtattttagttcagttggtgttctttttaacttatctactgtttcttagctaaaattactaaattcagggtggagcctcttaaggaatagggcaaagagagcattctgtatgcctggacttagcatgaatagatctgaaaaagaagcaaggctattttaactgagggtctaccttttataaatactttatctaggatatctttcatttcacctttggggcagcatagcaactaagccaaaaggttagcagatttaatttttcgtatctattagtaacttaagctttttatttgcctttttaaaagtctttaaataaaaatattgcaatctttttagaagcttctgcatatcaatagacatccctagatgagactatattgggagacctcattttcaaatgcacttcttcaagtgcagggttgttcatttggaacatttcactgtaactttaaattatctttagtaagattttgccatttctgtagtcccagctactcgggaggctgaggcagaagaatgacgtgaacctgggaggcggagcttgcagtgagccgagattgcactactgcactccagcctgggcgacaaagcgagactctgtctagcaaaaaaaaaaaaaaaaaaaaaaatgccatttctgtaagcctttgctactactagcaccctctagggcctaatactgatacacagattagccagaaggtactcagctctttagaaataaaggatcccatttttacctcaaatattgactttggctctcaggtcccctcaagcaactatgtcagtgatttttttccatacctaagtgtacaggaaaaaagaaacaaaggaagtagaaaacacaaaaatccctgtggacttccaaaagccaaagtttacaccccctgcaatattgccatctgctactggtttctttctgacccagtcagacaaaagaggcccctaactgtatccaagccagttaattatcagatacaatccaattgtagactcagttcagtttctgtcagaacttccaaacccagtgttgatcaaaaatttgctcaaacaaactcagagaactcaaatctctgagcaaatctgtggagcctcacaatctgagggagaacttaccaagatccccagttgctgtgagagagcaatggaaacaacaggcacagtgggtaacttgcttgctcacttggcactttgggggttactagaagttctagctcagatcccacttctgacaccatctgttaaaagaaaaaccttagccaaattaaatttaacagagtttatggtttttttttcctgaggatcaaggcagacaggaggaagaactagatagcagctttcactcaaacggaccagagcagcatgtggagtctctagaactattgcaagaataattcaggaaagccaagagaacccacagaccctcttaaggaagtggattgctcctgcaggacctgggagacaccccaattaccgtgagtgcccaaactgtgggagtgagaaagggagattatctggccctgaatacacaccctcactggggaacctgaagtctagatcacaggagaagattctgacaatacctggagctgagtcaatttagagagccgagggaaatacgggggtaggggaagcagtgggaaaagctctgtgggctctctgggttcccagcgaagccatttctgagttgtctcacagggttacctggagagggctgccagaggaactgggaaaaggccacagagagaaggaaacctccagctgaactttgcaacaattccaaccaaacaggaagtctcctggccagaactcaggggagggcgccaatccagtgtgcagactccacagacagggaagcctaaaagccctacttgctttcgcagctgggggctggtagcctggggaaagttcttggccctgctcgcagactgcgtggaaacagactcagtgctgttgtggggtggggcacggtgagagtgagaccagccttctgggtttcatgggagctgggtgaggcctgtgacttccagctttcccccacttctctgacaacctgcatgatacagcaaaggcagctacaattctcctaggagcataactccattgacctgggaacctcactcccatcccccacagcagccgtagcaagatctgcccaaagagagtctgagctcagacatgcctagccctgccctcgcctgatggtccttccctacccaccctggtagctgaagacaaagggcatatacgctttggagttcgaaggccccacggccccacccaccacctgatcctccccatactaccacagctgatgctgtcttgaaagtgtcacctcccagcaggaggccaatcagcacaaaaatagtgcattaaacaaccaaaactaaggaccctcacagagtccatatcgccccactggcacctccaccagagcaggtgctggtatccacaaaaagagacccacagatggttcacatcacagaactctgtgcagacaacctccagtactagacaggaacctggtagacctgctgggtggctagatcctgaagggagacaagaatcactacagtatggctctcaggaaatcacatccctaggaaaagggggagagtactacgtcaaggtaacactttgtgggataaaagaatctgaacaacagccttgaccactagaccttccctctgacagagcctacccaaatgagaaggaaccagaaaagcaactctggtaatatgacaaaacaagttctttaacaccccccaaaaaatcacactagctcatcagcagtggatccaaaccaagaaatccccaatctgcctgaaaaaggtgtcagcgaaactaagcttcataaatgaaggaaagaccgtctttttcagacaaacaaatgctgagagaatttgccactaccaagccagccctacaagaactgctaaaaggagctctatatcttgaaacaaatcctggaaacacatcaaaataaaacctctttaaagcataaatctcataggacctataaaacaaaaatacaaataaaaagcaaaaaaaccaaggtatgcaggcaacaaatagcacaatgaatggaatagtacctcacatctcaaaactaatgttgaatttaaatggcctaaatgttccatttaaaagatacagaatcacagaatgggtaagaattcaccaacaaactatctgtggctttcaagagactcacctaacacataaggattcacataaacttaagataaaggggtggaaaaagacattccatgcaagtggacaccaaaagcaagcaggagcagctattctcatatcagacaaaacaaactttaaagcaacagcagtttaaaaacacaaagagacacattatataatgataaaaggccttattcaacaggaaaatattacaatcctaaatacatgtgcacctaatactggaggtcccaaatttataaaacaattactaccagacctaagaaatgagacagacagcaacataataatagtggggggcttcaatattccactaacagcactagacaggtcatcaagacagaaagccaataaagaaacaatagatttaaactataccctggaacaaatggacttaacagatatttacagaacattctacccaacaaccacagaatatacattctattcatcagcacatgaaattttcttcaagatagaccatatgataggccaccaaacaagcctcaataactttaagaaaactgaaattatatcaagcactctctcggaccacagtggaataaaactggaaatcaactcccaacggaaccttcaaaaccatgcaaatacatggaaattaaataacctgcccttgaatgatcattgggtcaacaatgaaatcaaggtggaaatttaaaaattctttgaactgaatgacaacagtgaacaacctatcaaaacctccgggatacagcaaaggcactgctaagaggaaaattcatagccctaaatgtctatattgaaaaatctgaaagagcacagacaatctaaggtcacaccacaggaactacagaaacaagaaaaaaacaaacccaaacccagcagaagaaaggaaataaccaagatcagagcagaactaaataaaattgaaacaaaaatattcaaaagataaataaaaaagctggttctttgaaaagataaataaaattgatagaccattagcaagattaaccaagaaaagaagagagaaaatccaaataagctcaattagaaacgaaatgggagaaattacaactgacaccacagaaatacaaaagatcattcaaggctactatgaacacctttacatgcataaactagaaaacctagaggagatggataaattcctggaatgatacaaccctcctagcttaaatcaggaagaattagatagcatgagcagaccaataacaacagcgagattgaaatggtaatttaaaaattaccaaccaaaaaaagtccagggccagatggattcacagctgaattctatcagacattcaaagaagagttggtaccatcctattgacactattccacaagataaagagagaatcctccctaaatcattctatgaatccagtatcaccctaataccaaaaccaagaaagaatgtaaccaaaaaagaaaactacagaccaacatccctgatgtacatagatgcaaaaatccttaacaaaatactagctaactgaatccaatgacatttcaaaaggataattcaccatgatcaagtgggctccataccagggatgcagggatgatttaacatacgcaagtgaataaatgtgatacaccacataaacagagttaaaaacaaaaatcacatgattatctcaatagatgcagaaaaagcattcaacaaaatctagtatccctttatgattaaaactctcagcaaaatcggcatgcaagggacatgcctcaatgtaataaaagccatctctgacaaacccacagccagcataatactgaatggggaaaagtttaaaacattccctctgagaactggaacaagacaaggatgccactctcaccacttccctttaacatagtactgggagtcctagccacagcaatcagatgagagaaagaaataaagggcatccacatcagtaaagaggaagtcaaactgtcactgtttgctgatgatatgactgtatacctagaaaaccctaaagactcctccaaaaagctcctagaactgaaaaaagaattcagcaaagtttctggatacaaaattaatgcacacaaatcagtagctctcctatataccaacagcaaccaagctgaaaatcagatcaagaactcaacccattttacaatagctgcaaacaaatgaaatacttaggaatatacctaaccaagaatgtaaaagacctctacaaggaaaactacaaaacagtgctgaaagaaatcatagatgacacaaatggaaacacattccatgctcatggatgggtagaatcaatattgtgaaaatgaccgtactgccaaaagcaatctacaaattcaatgaaattcccatcaaaatactagcatcattcttcacagaactagaaaaaacaatcctaagactcatatgaaacaaaaaaagagcccacatagccaaagcaagactaagcaaaaaggacaagtctggaggcatcacattacctgatttcaaactatactataaggtcacagtcaccaaaacagcatggcactggtataaaaataggcacacagaacaatggaacagaatagaaaacccagaaataaacccaaatacttatctttgacaaagcaaacaaatacataaagtgggaaaaggacaccctattcaactaatggtgctgggataattggcaagccacatgtaggaagatgaaactggattctcatctctcaccttacacaaaaatcaactcaagatggatcaaggacttaaatctaagacctgaaactgtaaaaattctagaagataaaatcagaaaaccccttctacaccttggcttaggcaaggatttcatgaccaagaacccaaaagcaaattcaataaaaacaaagataaatagctgggacttaattaaactaaagagcttttgcacagcaaaagcaacagtcagcagagtaaagagacaactcacagagtgggagaaaatcttcacaatctatacatctgacaaagaacaagtatccagaatctacagcaaactcaaacaaattaacaagaaaacacaatcccatcaaaaagtgggctaaggacatgaatagaaaattctcaaaagaagatacacaaatggccaacaaacacatgaaaaaatgctcaacatcactatgatcagggaaatgaaaatcaaaaccacaatgtgataccaccttactcctgcaagaatggctgtaataaaaaaaatcaaaaaataatatatgttggtgtggatgcagtgaacagggaacacttctacactgctggtgggaatgtaaactagtacagccactatggaaaacagtgtggagattccttaaagaactaaaagtagaactaccatttgatccagcaatcccactactgggtatgtacccagagaaaaatcagccattatacaaaaaagatatttgcacatgcatgtttatagcagcacaattcgcaactgcaaaaatgtggaaccaacccaaatgcccatcaatgagtggataaagaaactgtggtttatacatacaatgcaatactactcagccataaaaaaggaatgaattaatggcattcgcagcaacatggatgagaatggagactgctattctaagtgaagtaactcaggaatggaaaaccaaaattgtatgttctcactcataagtggagctaaactatgaggatgcaaaggcataagaatgacacaatggactttggggattctgcgggaaagggtgggaaggggatgagggaaaaaagactacaaattgagtgcagtgtatactgctcaggtgatgggtgcactaaaatctcacaaatcatcgctaaagaacttactcatataaccaaacaccacctgttccccaataacctatggaaataaaaaaattaaaaataaattaaaaacaaattaaatttaacagagtttaattgagcaaagaacaattcatgaatcaggcagcctcctgagccagaataggctcagggagactccagtacaaccacatggtggaagaagatttatggacagaaaaaagaaagtggcatacagaaaacaaaagtgaggtaaagaaatggccaggttgggtacagcctagcatttgccttatttgaacatggtttgaacaattggccccctttaactggacaaaactcagtggttggcacaagagtaggttacagtctgtttacacctccatttaggttatagttcattatgtagagaaacttttaagacaacgttaaaatatgtaaggaggcaactttaggttaaacttcatttaactgctgtgtgggatggcatttgtgcctttgggctgtggggttgaatgaccagctgctttttccagactggctcccacacctcttaggtcccagaggctgataatggtataattaatgggcatttgagaatagaggcaaggatgtggtcctcaggacttctcagtcccagcataggctatctgtgttcctgcccctccccttgtaacagaggctcctctgtccctgtctgatgagttccttcatttctgcttcctcctcagcctctgctgcaggggtgggaacacaggagacactggcatggaggctgcccagcaggatgacacccagaagacgtcacaatgcacactgctgggagcccgatctgaatgaacacagggtcgtctcatcttccaggagggaatgattcccaggagctgaccatggtactaagccaggtaagcaggcctcaggggacaggccagcgctgcatggacatctgggtgatgttcaagcccctcagttaggtgtttcccctagtttggcctagagaagtgaatggcaacctccctgtgatttctaggctctcctcctggacagcaccaaaaatgtgccttcaagggccccaggacagccttactgtgggccaagtgcagtgaaactgggagttgcctcgagaagacactccccaagagattgccaaagagaatggtgcctatttccatgactcaaagggcttcctctgtcctccaaagagcggtgtttggagcgtagaggtgaaatgttcagaggatcagggaccatctgccctagacccatagggacagagaagggtgagcaattactgcagcaccccagggagggtcaagttcttgtaacaccacctccgccggccagttacagggatctgggcatgctaaggtcagttctttcttattaagagtaagcccatgggtcttcacactggactcgtggaggctgagatgttgtgagtccctacacaggcttccctcctgtgccatggcctgcctgcctcctgacctttgcctattccctctgttctagatgtaggcaaggagaccaagagctgcacctggatgatctgggacatgttctgtggactggagtcaggagggccccaaagtggccccagcaaaggcaacagaggaggtagagcatggtgacacgttgcaaagtgcaaaggcgctggccctgggagaggcaactgagaaagtagaggttgctgagaagacggaaggtacagagtggggcaacatgtcagacaatccctactggaggagagttgtgggcatcagtgggatcatcctgatcatgctcaaggtccttggcgtcatctactttgcctgaagcagctgggctggggccgtccaggaggaggcagagctgctgcttctccaggatcatcatgaacagggacaaagcgtttcctactgggagacccatgggcctgggaccaaggattacattaataaaaatgttcccttggtgtcatgcatcaagggctaccagcagcagcacacacatgccgtgtggcaggacagagcaaagtccattcgccattacagaaagtatgcaaatgagaacatctgttcctttacaaaatgagtcattttctccaaatggctgcactgcataaacactttcactttaaatttaattttggcttttcatctctatatatatttggaatttttgcttgtgtttacttcactgtcaccaattctttcatgtacccaacttccattgcttggttctctccttattttccaaggtatgtccctgctggccaagatgccgagttgtggaagccccaccccacccctgcaagggaatctcacctgtaggtgctctccagcactgatgaccacacaggccatggggaaacaggtgccagggatggaagctttggcccctgcctgaacctcagtgggactgaggcaggctctgctttaatagaacaggcctccccaccactcaactctgtttagcttctgctgtgctgcatcccttgagggcagattaagaagaaactccctccaggccagctctccccagtcacactcacagcctgcctggcatcgtgacattcttgggagttggccccctaggttagatccacttgagctatcagatagaggacactcctcagccgtgtttccataggggttccctaaacctctccttcacttttcttcttcccagtccaaaataaatgatttgtgtctttaggaaaagttccaggtgccttgaagttatttcatcatgagaatcacgctctgaaggtatattcacatgaccagccctcatcctttctctaatccttcagctgacacttttgagtgtctaatatgtgccagccaccatgtcgagctcgaagaaaataaccgtgaacaaagcacaggggaacttctctctggagtatatggtgtatggtggaaaataagcaatcacagcaatagccagcatttcatgtgtcctgctgtcttcaggcaagcccagggtaagtgcattatcatattcaagccacagaaccacccttgtggagggacaagaattagccacgtttcacaggatgcagtgtgtgcactgcaagagaatccagcagaaacctccatctagcctcagagtcagggaaagagggaatcagttggatggataacagaagggacatgtgtgagaagacatgcagcaagagtacaaggtatgtttgaggatgctgagatacggcatgtgcatggagaacagtgggagggagggagtcggaagcctgaccagcaggccttgtatgctttgggggcctacgtccctggaagtgtaggcaaggaagtgataggatcagatttgcttcctgctgctgggaagataaaagtgagacaggaacacccaccaggacactgctagagcaaagcaggcaagttggtggcagagaggtaaagaggtggagacctttggagggaggggccagggatgactctctggctggagcaggtgaatgaagggggcacctgcttcattcaatgaaggtgaatgaagagtaagtgcaggtatggggaaaagatgaactcatttctgatatgtagaatttgagctgcatgaagatgtttattgccatgttgataatattaagtcttctaatccatgaacatgggatgtctttccatatatttaagtcttcaacatctttcaacactattttgttttcagtgtacaaatctcacactccttttgctaaatttatttctgagtattttattctttttgatgttattgtaaatgaaactgttttctcaattttgtttttggatggttcattgctagtatttgggaatacaattaatttttgtatattgattttgtatcctgcaaccatgttgaacttattcattagttctaatcatttttaagtgtacttccttgggagttttcttatacaaaatcatgtaatctgtgaatacagaatttacctttatttatttgcaatctgtatgctctttctttttcttgcctaactgcctaactagaacctccagtacaatgctgtatagagaggtcttgtttctgatatcaggggaaagcaatcaggttttgctattaaatataatgtcagctgagtttttgcagatgttctttattatgttgaggaaactaccctcttttcctagttttctgagagtttgtttttcatcatgaatgggtgttgaactttgtggaatgctttttctgcatctattaagatgattatgtgacttttgtcctttattctacctatatcttatattacattaattgattttcatatgctaaaccaaccttgcattcctggggtaaatcccagctggtcatgctgtataatgctttttatatgctgctgaatttggtttgctaatatttggttgtgtctttgtttctataatcataacaaatattggtctgcagttttcttttgatatctttgagtggtttttgtttgtttggctggtgtgcagtggtgtgatctcaggtcactgcagccttgacctcccatgctcaggtgattctcctgcttcagcctcccaagtaactgggactacaggcacgcaccaccacaccaggctaattttgtgttttttgtagagacattggaatgacaggcatgagtcatcgtgcccagctgatatctttggttttggtatcagggtagtattacactcatagaatgagttgggagatatttcttcctcttctattttttggaacagtttgtgaaagattggtattaattcttgcctggagacatttaagggtagatgttaagttgaacataagaatccagaactcaggagagaggctggggctggagtcccagatctgggggagacaggggagagagatcaggcccagctcagaagggaacctggtagagaaagcccaaagccaggcagatgagattgcacagggaaagtgggagaagagagagcctagaacagaggcatgagaagcatcagcaccactagccatgtaaagaaagagggttctacagaggagaccaagagcacagggtcttgcagcagggagtttgatgatcttggccagagcctgtggaaggggtagagccagcctgctgtgttaaggcaggactggaacatgaggaaatggacatgaggaaatgtttcctgaaggagaaaaggtttcctcttagggggccttttttaaagttttattttgagacagagtctcactctgtcacccaggctggagtgcagtggcatgatctcagctcactgcaacctccacctcctaggcttaagtgattatcgtgcttcagtctcccaagtagctgggaatacaggcgtgcaccatcatgtccagctaatttttgtatttttagtagagagggggttttgtcatgttggccaggctggtcttgaactcctggccttgagtgatctgcccacctcagcctcccaaagtgctggaattacaggaatgagccactgcacccggccctcttaggggcagcttttttgagaatggggatgaacctgaaaccccagctgggcccagctgcctgtcccttccacaacaagaggccctacttggattcatcctgtgattccaaggacaataacttccctgtgtttcttctgggaaagtgagggcccctggggctcactgaaaggactgcaagaaggggctccctttgagattctggctttgctgaaaggtttattctgggaggagtgggcacctcacaggaaatatgactgccaaggggtgatgtgaatgagggaaaccttcgagagagagagagcctcagaaagctcctggagaaagagtaaggctccagctcagacccagatgaaagggcccagcccggaagctgagttctgctctagcatctcctccaacagaggccaggacaggctgcttctcccccgaaacgaggagatccattgcctcactagaccatgcagagatgagtaggaggagattaaggagctctcccagtcactccccaacctcagccccatgccccatagccccctgaagctgggcttctcccctcctccacctctcagcccacctctctctccttgcctaagctcccagcctgcttgtcaccttcactgcagggaaggagcccagatgaaggcacaggcagaagagggctgccctgggggccacatacacccaaagggagagaatggagggtgggatgggcttcaggccaacctgggggcgtgcttgagtgacttccttgctttggagaagaatgcggctgtttggggtaagacgttaacgaggaaaccagaatctacccctgtcctgagcactcatccctgggggagcctctatgactgagtcaccttctccacgaagaacctgcatggggtttcacctatcaccttccttcccatcacccagggtggggaagggacagacctggctgagcagagccacacccagccacaccccaggggtcaatcactggatcttctgaaacctgggtggtgcctggcgcatctgggttccttccttccccagcccaagtccctgcccccagccttgtctctggagggctcagccctactctctaccttctgaggggaactcttggccccaggagagagagcacaactccaaggccacctcccacccattccccgcactgggttcagcctgtgccacccagacccggtgcttctgggcctcgcatttcccctctggcaggagagcaagaaaagatgtgactgtgctccaggaacagaaagtgccattcggacccgagataaagagacttagcacatttattcactcacagaggtgaatgaagggctcagggtttgaactcgatgacactgatggcgatccgggctgcccgctgtaaggcttcggccacttgaggcttttcgtaagtctccacctccatggcacggaaagtgggcacgtgcgtctgcagggccttgcggccctcgggggcctctgccagcatggtaagggccttggtggcattcaggcgcgctatggtcatgggggagtgcagcagctccaggagcaggccgatggcttgtgcctccagggccgcatacttccctgcaggccaccaacacaaggcgttccaaacagcccaaggggccctcttctcaccccctctcaccctagccctctcctgaccctcctccttgtgcagtctcaaggggtttatgcctggtttatgccccaccaacatgccctcaccctcagggctcttgcaccttcgctgagtccggcctgggcctggcctcttcatctcctgcctttccggcctcaactggctcctctccatccaccctcgtatcctgcccaggagttcaagaccagcctgggcaacataatgagattccatctctacaaaaatttaaaaattatccagatgtagtgacaggtgcctacagtcccagctactcaggagactgagcggggaggatcactagagcctgggagtttgaggctgcagtgatcgtgacatcgtactctagcctgggtgacacactgagacactggctctttaaaaaaagtaagcccagctgggcgcggtggctcacgcctgtaatcccagcactttgggaggccgaggctggtggatcacgaggtcaggagattgtgaccatcctggctaacacagtgaaaccccgtctctattaaaaatacaaaaaattagccgggcatggtggcaggcgcctgtagtcccagctactcaggaggctgaggcaggagaatgcgtgaacctgggaggcggagcttgcagtgagccaagatggtgccactgcactccagcctgggcgacagagcgagactccatctcaaaaaaaaaaaaaaagtaaacccaatagttcatatatgttgccaatatttcttgagcacctactctgcacaaaacacacatggttcctgagagatgccctcctcaaccattcgctgcccctttctgctgtccttgccggccctatgctcctgcagtgcccagtggactctcccctttgctggtggaacctctcagcctgggccctgccaactcccattgtccttgggattgatcccaagcccttcccagaggcgacttgtcccctgtgtttgccccacccatgctgggcttctcctccacatccctcatcactgcctcccagggcctggcacgtggcaggggcttcaggaccctcagctggagtgccagcttgggaataagtggcctcatctccctgggtctcagcctcttgtgtctcgagccccgtggccctccaagcactcctacagaaagcctggaccgagaaggacactgggctgaggctgccccaagataaacacgcagggggagcccctgccaccgtgcagtcagcatcctgactacaccagtaaaaggaggggctgtggactccaagaaagccccaacctctcccatctgcatacctcaagcagcattagggtcaggtgtgcagggcctgggaggacctgtctttgggaggctgattgcaaatccaagcccagatggtcctccatggaactcaaaggaagcacagggccccaggctggtgggtgtgtaggggccagagggaaagtcaaatgctttcaggggtcctgggagtgccacgccccagtctgccaggtgtggaaacagcccagggttcttccatgagcccagggttgggtgacttagaggggaagcctgactggctgggagtcccaaggtagggggctcgggggagataattctgaatttgccccctcctccagtttaagaaaaataattaggatgaataaacaccatagagtcaagggctccagggtttgcttagacctcagggtaacagaatcatggatggcaaactaatcaacccttgagtcacagctcacaaggggcctgggtgggaggcgggaattccaggcccagggaacagactggtgcgaaggcacagaggtcctaatgtgagtgactggtgaggggccactgtgctggggagaagagggagggctgggccttggacccaaccttgaaaggacatcagtgataggccaaggggaggttttttttttttttgcaaagtgtggagtttgggggacgatacccagcccctgagtacagaaagctcatcacggctgctagcctgctagggtctccctccctgcggcaccccccaccgcctcaccttcagtgatcactgtggcgaacatcagggcaccggcagcgttagacttcacatgctccactgggtctttcagcagatggaccaggatggggatgacgtcaaaatgacacacctgtttcttgccctctcgagatatgctggggcagagagggaacagagaggggctctgcttggaagggagaagaggcgcaaggcccaggagtgccccagggagacacaaaagaaataattgtgtgggggctaccccaggtagtcccaggactggtccccatgatccaggactggtcatggcagggatgctgggctgcagaggagcattggtgtgaacgcggcccactgccagtgaagaccacggggtgacagggcctcactctgagccagcacacagaaaagaaatagggcatgttctccgtggccccaaaatggggaacagcaggacccaggggtgtcaaccacagggagacctgttttgactttgcctaagagccagagctgacagtgatgggccaagctgcccccaacagcagcagctgccgggcactgggcaactgcagctaaggactcagaccaggtaacttttaggccacttactctggcactgaatgaagttgtggaaatgaggatgatgaactccccaaaagtttcctgagagagggtcaattctgtcccctaaaaagaaagggctccctgggccaggaaacactgttcacaagccccacaggaatgccacagtgcaaagacccctgtgtcacttagtttaatcaacctttcccaaatgtagccaccaaagaaccctcatttttgtagagctcttaatgacctcaaagacacaggtgttccctgggaacacagattgggaaatgaggttggccagccactagctgtgacactgggagcctttcagggcagtgggcctcaaccccgaagcccatgatcaaagttgcagagtcctgggccccacatgcagggattccctgattcgttcacacagcaagacactgagacaagagcgatgcagggattccccgatttgttcacaagagtggggacaagagcagggtttctccagctcagtgttctttagggccagataattctcaactgggagccaaagctcccccgctgcaaaccctgggtttagggcagcaaacagaggaaagccctgtcctcaggagctcccctcggggatgacacacaaagtaacggcagggatggtggtcacagtggacatgggaggacaggggacagcagggaggttacagtttcagagagagagagctctctcctggaaagccactctcatggtcccacagaaaggggacctctgagcagacctaagaatgatggggctgggacagggcccaggaatctgcattttcacaaacctcccggtggcttgggtccggggccccacttgcagaaatactggcctgagcctctagtgagactctcagaagagaagccaggacttagggaaggcaagagggtctccactaaagagacatagccacagctaaggcagagactctggggttcggtgaccagcctgtcctcgtgaaaaggggcccagtgtgagaacacacaccgcaccctgccccctgcagctttgaggctttgggctccctcagtttccaggccaggatgtagactgtgatcctgtgtgacctggtgtgagacacaagacactgcctccttttctcacctgtgaaggcagacatcacctccctggagggtcgcctaaatgtgaggtttgtagacaacgcctggcacacaggaggcactcagtgaccgctgggtgtcatgatcatcaccagtgcatctcctgtgctggccttcctcatggggagggggtgcacaatcatctggctttgtccaggctgaggggtttcctgggatacagtacactcccaggccaacgggatggtggtcaccctaggggagaaggtcatcctctgtcccagctccctcctgcccctgggcacaagcaggcaaggggaagcaggcccagggtggccgcccttgagctctggaccagtccagctcaggtgccttctcccagccttggtagaaacccagcctaggccaggcctcacctgacattaaggagcgcacgggcggccttgctgcggatgttctggttggcgctgaggagcttctgcttcaggacaagcaccacattgctgcccagggcctcggtggcatcctcctgcaggcagaggaccagtgtgtccaggatgaactcctggaactcctcctcctccacctccacctgcagcttccataccagtgaggaaatcagacctttgctgatgatctcttgggcccctacaaggcaggaaagggcactgagggcgggctggccacacacccacccacccatgccagttggcctgcagggctcaaggagggtcttgcagaaccagtgggtgggtttgacaaaaggacttgcaagtgccacccccacacacacgtcccgcctggccaggggcctgagcgaccagcaggcagctgcagtgacagccatgtcaggggctaagggcggaggctcagagaacccaggaaggaccagtcttttgtcgcctgtgtctcagggggcatctaccatagcaagcgcacagcagctggagaggcagtaagccacccctcggagagctgacagctcactcctgcagggcccaggcacaccaggagacctccactcttccctccccctgccccagagttggggagccagccaagcccccgcttcccatccaccaaaatatttcaaagctgctggagaccccacactggtctgaccagccctggagaagagcttggttttgactctgagacagaagacctagagtgtaggccagtgtcacactcaccaaaaagagctgtgccccaactaaaggtgacgggaagccataggctctcgtcttcaagggacctggggctctgtgggaagggggctccacatggcacagctggggtgcaggtactgggagaagcacaatgaggcaaggctcccccataaacaggccccacctggctcctcccagctcccttccctcctgaggaatgtcagcatgtggttgcctagagaacccagcacgagtggcatcctgagcccaggacggtgggcagaacagccctcctgagtcactgagatgagaagcacagggaatgtgcacagtgcccttccctacggcacgcagctgccctcgccactgccctgcagcccactgcctactgcaaagccatctacagcccccagggaggtggccaccagcagacacctctttcttccgccctccccagctaaaccctctaatttactctagagagagaaataaacaggttgattagcctaaaggtctccaagtgccaattagtaccagggatttcctctttgaagacatcaccccaaccttcttcccccactccctgaggacatcaaacagcaggtgcccagggtgatggggtagaaaggcggagcagggtgctgagtggctcttaccgccccccaccatgtctcataatgtccagcagctctccatgccccatcccccaggtcctctggtgtcaggtggcttccagtgcccctggccagcttctcactgtggtatcagatggagcagctagatctgccctgtttgttctcagggctctgaccacccaggaaaagtgggttcctgttgcttctactgtgttggccttttttatttaatatgcacagattgcaaaaaaaaaaaaaaaaaaaaaaaaaaaaagcctaggtctcatttaaaacatatcctttccaatctgtgtgaccttggacaagttacttaacctctctgagtctagtttccttatcactgaaacgggcctacctggcagggggttgtggatgaaaacgtgttccacgtgctgtggatttcttcatccatgtaagggtctgtccctgtgtgcccagaacatctgggcctagggtggcaagagtctcctgaattccaccaacactgagtcccagctacaagcaagggcctgctggaggctgaggagtaggatacaagacaaacgctgcacagcccaagccctgcagatcccatcagtgcagaaaccccccaaccctaccacccctcccgaggcctgatcctctctctcgcgcagctccctgctttgcccataccacacacctggcctcctgctcccgctctgcttcccctcaggttctgcccacggtctccctacccactcctggctatagattcaactcagtggtgacctggacggccctcttccagctcacagcagggaggcgacaatttgaccttctgttaattttgctggcagatggaaggacaaagttctgggatggggacacttgagcaaagacctgggggtaaggaagttgttaattttcaaatcagggctagattgtagcctcgtctcacctatctgagcttcccaggaaatccctgggacaggtgtcattgctgagtcaggatgggcacaagttaggggaggaatatagaaggagttgaggtcagaaaagtcaacattcaaggtgatcacctccattacccacctctccttggtgaggaaactgaggcccagagaggcaacttgaatacctaaggtcacacagcagatggtggcaaagccaggcgggaccctcagccccttgggttttgtttctcaggcatttgtcttgtacttctgctcctagaaatgcttagcacagggaccggggttcattttgagacagagggagaagattaaaaataaaacgcgtgccgggtgtgcctttctgctcgttcactttgcttcttttcagctaaaagaagagtctcgggcctggctatttataactaacccagatctgcgatggcttgctcaagtgggggtggggcacacagaccccagggaaacaatcggggaaatccacccaactgggcggcagcctgagcgtccgctgggggtggggggtggttgcagaagaggtaggacaggtggggcacagagaatcagccagatggggtggcaccagagcaggccaggctctgggccatccatggtttagagacaagcaacatatgcccaccccacccccgggaagtgggaaaactagtggaatagtcagctggggacaggtcactacagaacaggttgacatgtgtgtagaccaggaattccagggtcctaggggctctggaggtgcacaaagggaggccccggggaagctggttctcatggatgtggaggagagcccagaacagcagggctcaaatgtatgtgtttgtggggagtccccgatctggcctggctgatatgtaggggctaggatgggttcagtggttgatgagccaaagagatccaatgggattgaggggtcacggatgtccatggtgtggagccccagtggtggagtctgggtcattttctttgtggtggggcagggcgggtgctgacaccatgttgaggggccactcctcagccagctgtgcctgctgggttggggaggtgctgagtgggctcagtcaccaccatggcccccttcctctggctacagcaaagccccagctgttgtctcccagccaatgagggctcaggacagagcaccagcacccaggttctggtcgcagccacaccctttcctgttaggggactgcacatccacacatggcatctggggcccaccttgccgcaggtgacccacctgtccagctttagccttgcatggccctgtgccctgaactcctggcccactgggcctgcctttgctccaaggggtgcttctctgtcctcagctttctcggcttccaggtagctgggagcatggttaacagcttcttcctttaccacatgctctcttcccgtgcctctggtaccctccattctctggttcctgaccacctccccaactgctcctccatctttttggtaagcaccatctcttcctccagtggtccccaccctctccccttctctcatctccctgggtcctgataatgccccgccactgtctcctaacatgctcttggtctccctgccatctcacagccacagcagaccgtacactgaactcagcctcacagactgacttctgtgctcactcccacttcctctggactgactaactgatgtttttgttattttattatgtccagtaggacaactcacattgtctgtgggaccacgcctactgtaaacaggcaattaaaaacttctcctcctccttctcaaatttaaaagactaatgttaaaactctcgagcagttcttaggccaacgtccctgatcctactgccccaagctggcatctgtgcatgggcaacgaccctggccccagccacactggtcttctctgggttcttcctggcctcgtgctccttcatgtcctgcaccgtccccgccttggaactcacttccctcccaccctatgtcactggccacctccacgcctgctatggcctcattccaagcatctcttcctttgggaagctggcccaatgcccaatgctcccccactccacatgcccccagagccccagtgggtctcctcagatagcctcacatgactgtaaggcccaatcgttgtttgctttctgcccctgccctacaggcagagggtctgccagaaaagggccggtctgaatcctagaactgtgcctacaactataccctggtggaggaggctatctgtaagtgactgctgcatgaatacaatattggtttgatgccaggtgagatgtccctctcttactttgaggtcaagtcagggaggtgtcagccagccccagtggacccctccgcaggctagcctctgctctggaccactggaaagggccatctcactgttgcatgtgggcttacctctgcaaacaattcaactctgacccccagactctgcagtggaaacagcctctggctatcccaagacatgctaatatgcatttcctatatacattaaccctcagagccaccctctgaccacagtctgttacattcccttttgacagaagaggaaacagaggctcagccaggtagcacagctgccggtctctgtgtggtcctcctggcaagaggtccagcctgacacagcctggtggtgtggaaggcaagcacaaagggtagctagcccctcagccattggctgaattcccttggtcctcactggacacctccagtgagcactaagttcgcctccatgatgcccataacaaatatacgtcctgttcctgacagttgaggcagcaccctcacaggtggcccatgaccctgcaggtacgtaacgcaatggtctccatctcacagaagaggaaacattcctagggaggttatgggatgatgctgagatgccacagtgtccagctggcaaagccaggcacatgcccctgcccctccaccacagagctatgatggagagaccgctccatggacctctgccatggtcaggtccagggctgctgctcaaagaatggcatgatccacaccttacaaaggtgtgaggtgataaggaacgcgttagctgggaaggcatttgcactttgtcagggatgctctaggatacacaaagcttcagatttacaaagatggagaagagagacaggagcattcatgtcttggccctctggcttgagagtcttttaagcatggaactgagggactcctggccctgaggtccacagataggctttgaaattgaaaacagaattttgcagcctgggttcagctgcgttttgctgagggtctgatgctttccaccagcttcccaaaagcgccaatcagtggccttaactgaactggctctctcacgcttgtctgggctgggggccagctcctcggtccttctcccttccttccctcccaaggccacccttccgtgtgccaggattgccagggacgccaaagagcccctagacactgggcggtggcggcggggggcggcggcagagatgactaatgctccctcccatcgctgcacaaacctcaccggtgtaaatcgttagggtttgcataggcctttcacacgttctgaaggattggtgagacaatccaggagagcaggtgccactagccccactttgcaaacagaaaggctgggagaggtcagtcggttgcccaaggacgtagagctcacaagaggccgaactgggtttgaacccgagtggagagaaggcgagccgggactggctgcagtaaagagggccaggaccatggctgggctcaggcttggtttcccgggctgccagaggtggcccctggggctcggctaccaggcctcagcgcagcggagtcggtggaacgccggcgcggggagctcttgcgggactgcggcgcgcgcggagctgcgaccccgcccctgtccgtccccattgggctactggcccgtccgtcagctgcctgtgcccaatggacagagggccggcgctcgtggcggggcggaggtgcccggcgcgtggtgcccggcgggcgcgcggcacccccccgcccgcggttggcctggcaacgggctgcgctcgcggctccgccccctgccggcggcggcgcggcgcggggcgggcggacccgcggactggcggcgggcggcgggcggcgggcggcgggcggcgcgggagggcgggcggagggaaccaggccggccggagtgtgtgcgccgcccgcggtccggtcacgtccccgcgtgggcgccgctgcccgcgtcgtacggaacgagggcgccgcggccccgtgctcgccgccccgccccgccccgccctgcccggagcagctcggcagatgctctgtgctgcggcccggaggtgagtgagccgacccgcggccggccgcgcgccgctgagcctcaggggtcgggggcacggccggggcatccaccttgcccccacttgggactcttcccaggcctttgtgccccggatccgccaggacgcagcgtcagggatgcccctcaggggtgggggacaccaagggcggggacgcctgcgaggtgggcagggggcggcctctggtcgggcaggtgctgggggagggatgcgccgccaagccgatgaccccgcgggagggggcggttgaggacccgggagggtggacagagggcgccggggatgccgcgcggggccgccgggcgcccccaagcagcggctgatgcggagcccgggcgggccaggcgagctgcgggagcggcgctgaggcgggtctccctagggggaggatcagggaggggcggccggagccgatgcagggccttgcctgaaaccgaggagagggccccagaggcctgggcccgaggacctgggcccgcagacggacagctagcagttctcggtcactgctcttgcagcgagcaggttcctcacaggcatttagaggaagagatgagtatcgacctgctgcgattgtaatacgttcccggctcaatattttttcccttaaaaggcggtgggggtgtttgggggaggggagtgagggcctcagggctggcgctccgtatcctgcgggcgatccgagggggctctgcctttagggcggtgctgagccttcctgggtgatgatggcaggattcggcctaggccgagaatgggggctcctgttaactgagacaagaggatgatgccaagcgagaccagcgttccgcgtagtccgtgttggggtggagggacccgcctggtagagaggtctgtcttgcttggggagacagctgagcccctgaccggctcctttctgcccaagtgatttccctgccctggggattgagctctctggagaaggctccttggccaaattcaattaagcaaatatttattgagtggtcactcccccagagcttgacgctggggtgcaccgggtgggagtggactgggcctgccctcccaggactgattgaccaccgcataggggaaaacgtctctactcgaccaaccccgcttgagtgcaggtgcaggggcctcgggagggacctcagagtggtgtcctgggctggggggtcaggtgagctcgtgggcaacatgacatttgaactggagcttgaaggacatgggcacagctaagctgggcattgtgggcagagaggagagaatagaccgaggcacttgggcagttaggtctgatgggagcacttagcatgcctggggagtaggaggaggtatggcgggaaaggccggtgggggctgcacggggctgagggagctgggaagtggaatgaccccactgctggttaactgtggctatggtggagaccacggcttcctcatctgtaaaagcgaagcagttccatgaccccatgagctggggtgggcctggagaagagctagctttaaagactggggaaggctccttgcagtctgagactgtgcttccaggcacttctccctcgggcacagccagggcactgggtaaccacccaggcaacccccttgttaggattgagttgcctgtttcggggatgatgcttagctagtgactctgtgcctctgggatgtggatgtttgagagcagtaatcgtggcagcctgggagcatccatctacggggtgcagtgggggtgtggatggcctggcggtgcttggataaaatatgcgccttgagcaagcctcattctctaggaatgaggagatgctggcatctggtttaaaagtcttcctgtgtgttcctctaactgacgttgattttctgagacaggaggtgaataagacataatttctccccctcggaaattggtgtcactttcccccctaagtcagctccctcatttctggggatgtttttgctctccctctgaaggggctgtttgttactcatctttgtagtgtgcctaccctccccacccaacacacacttggctttggccaaggcccaggttgatgcagcgagaacagggcctgccctcgtggggtgtgcagtctgtgctgagcagggtgagctgctgtgctctgtgcctgtcgcctggactgttgcagggacctggcatgtgactgtgggtttgggacacagggaatggattcttccctctgtccccagcctctcagtccttttgttttctagaatctcaggaggaacctcagagacctggaggccccaccagagtggccagaacctggtgcaggagtatgggtggggtctcagtctggccctcaggagcttctagaacaattccaggaatttgcaggtaactggattgacttcacaagggctgcccagggcccccgcagagaggccagtgggacaggaatgctgaatatagcaattcaggaatgctgaatttagtcatcttgtgtgtgaacacatgtgtgcggcttcctcccctggaggcaaggaaggcagccctgtgctgtctgtcccacgctagcctcagaatacttaagacggtgtgtggtggcaaaggcactctcactgctgctgaccatggcaggtgcacgggcacactggaggaggcaggtcagcatgctgctctcccgaaccctccagcaaggaaacctggggtagccaagcctctgagcacctgtgagcactgtgcttggctggaaggagcacaaagcgaaatgaacagaggcgtcagtgcagatgccaagggtcagccccaggcagaatcccagagcagaggctatgctgcggcctgggcagaatgaagagggacgtgggagcacccagactgttgtggctccggggtggtgaggtgagcattccagtctaggtggcagaagacctggagtcaggtcctggtcccaccatcctaggtccagcccctttttctctgaacctcattatcctcatccatacccaaagccaagagtgccctgccctgtccccacaccagcccctgccacacattttggccctttcgtgcgaacaccgccaggggaggcgcttcacaggattgaaccaacagggaccgcttgacagatcctagagcacataggaggagacatcagccctctggactgagccggaggagcagaacctcacgcgattcatccattcatttgttcagctaacatttaccagcgcctgctgcatgccaggcactgtgccaggtgcaggggtacagcagggacgtagcatccactcacagtgctcacaccagacgggcaggggttgacagtaacacatgttactaagtgctgcactgtggagaacactaaagcagaaggtgggggacacgagatgggggtgggggactgacacagtgccatgcagaagtgctgggtgagtggtgtggctgagcaggggagagacagcaggtgcaaaggcgctgagcagacactccctggcccctggaggccccaccagagtggctggaacctggtgcaggagtgtgggtggggtgtcagggccaggtcctgcaggactcagtgggccccaatgaggcaggaagaccttggcagggttggagcagagaagagactggagctgccctcccaggaggagctaatctacactttgaaaagatctctctgctgaggtgggaaaataggctagggtggggtaaggctgggggccatgaggggctactgcaacatcccaggcagagaggctgctgacccaggggtgggagctctggaggccctgagaaatgcaggtgggagatttgtttttttaaagctgcagcttttaaaggacagctgcagttttggtctgaaccagtagaaagatggagctggtattggctgagaagcaagatacagaaaaacccattctggagaggtggggaattaggaggtgggtctgagacctggagagccattgatgggcacatgtggccagagggagagcaaggctggaggtggcaacctggagcccctggcactgaggtgtgtggcaggccggggaccacgtgaggtcacttagggatcaagggtaggtaggatcagaagaggctgagctgggctcctgggcctccactgtggggaggatgagttgagaagcatcgagaaagagagattgaggattgacgggcaagtgaggtggaagcacagtcacagtggcgcctcgggaggctggagaagagcgggtcccagagagcaggtcccctgtgtcaagcaggcagggcatgcccagggactgagcaatgcaggcacagctggccacatgattttgggggcccccatttgaaaattattaagggcctgacatgatggcgcacacctgtaatcctatactatgggagactgaggtaggaggatcacttgaagtcaggagtttgagaccagcctgagcaacatgtaagagcctgtctctacaaaagtaaaactaaaattatgcattccagaacagcaacagcagagcattaaaactgtatggatgcccaagtgagtgcccaggaagctggctggtcacagggacctcaaggataatattggggatgtagtggcccctgtggagaaggaaggcctggagggtgggcccgcaacctgcctgctgcccagtccccacagcatttctcctcccttccctgagtgggcgggtgggttgcgttggactttcagggccgctggagtcagtcacacccagcctgtgagcttcaccttggcaccatggcccagggaacccaaagtgaaaactgcagcaggcaattgcctgctgcaattcttcactaaatgtcttgcttcttgccccttggtctgtggacccttgggcaagaggcagcaggaggcacatcttgaggttgaggtttagatggtcccatcagcaggccctggacctacatggccacagcttcacacagcaatggcttctttgcgttcatctcttttccaaaggaagctgccacatcacagagttttgagttatttgcttctaaattaaggtgtaactctcttttagagacgtccctggagaatccatcaaaaagtgctaagaagcgagactgttaaaagccacagtgcagggaggggccttacacatagtgtcaagcccgggggtgttccttctagcagcctccaaccagaaacacaccccgtccccgagggctcagccaggcctctcatggccatgggggaccgtggttgtggttagagcaaacctttcaggagacccttggcccctgggatggagagctgccaggacagaggtccctttgtgaggtctgcccctgtgagtcacggaggccaaggtcctttgtgaggtctgcccctgtgaggtctgctcctttgtgaggtctgcccctgtgagtcatggaggccaaggtcctctgaggtgtggagagtggacctcatgtgcccagtgccttagtaggtctgggcagccccgcatctgggcagcatggtccctctcaccctggttggtcataggaagggtggctgaggaggaggctgtgctggaggctggcatggcagtgagggctggctcttaggctgtggccctgctccagacagggctggtggggcctctatgtagaacagcgccatgttcctgaccatgtttcctatgccctttcctgctgctatttttttccccttagcactcgccacagcgtgacctgctccctatttgattcattcatcgtatgtgtttgtgtaagctccatgagggcagggacgttgcggagtcaccattgagaatcgccacccagggagtcgctgtggagggactgaatattcgcagacagtcatgcctcagtggccctgtccagccccttttgccctagggctgagctgtgtgctcgtgcgctgcagaacccctgctccagctcaaccctctgctcctaagaggttgtacctttgggtccccagagatgtgtctctgggcctcaggtttggccaccaaacacaaaccaccctcaggtggatgctaccagctgggccccgtcaggcccaactgtgggttactctcaagccagaggcaggtggacagatgcctcgggctgacgccgggccactcagtgatgcaatgtgactcagtggggcctttgtcagacacggggattcacagagtgatgaccttcagaggcatgtctatggaaaactgtcctaaggggatgagccaagaccctgaaggtagtaaaggaacatgatgatggtagagtggcctttccaggtggcccctgtgccccaagatcaaggagtggcctctcaggccagtagaggagctcagggcaggggaaggcaccaggcctgggtagaagtccagctctgcctgtgatggtgaccctgcgaatgctttccactctctgggccttccttgcctttgagttggaagctctgggctgggtcaagtgtacagatagtttccttccttatctcaactctggagtgaccgtccaaagcatgctgtgctgaagaggattctaaggctgtgctgcagcccagagggaaagagtcatggtcgattagtgatgtctgcagcgggcacgggaggcaggatttagatgagcttgccagtgactggtgaacctcaccactgtaccccctcctatctagcagctttaacccaccctatctctccttacatgccccttccttagtgacactgatgctaaccccttattgggaaggactggcctccgtcttcctgagtcccatgagcagctcaggtcattgcttgctgactgtctcttctctcatttgatgcctcactccctgtagtgacctcagggtccaaccccatgcttcgttcatggcagcctctttctgtacactgaagaatgaataagtgaatgagtggtagagactcaaccactctacaaggccgggagcctcctcttggatgtacacctgatgttgatctctgttccagcaaggagcccctagaagccttcttggaattgggaggctggatggccacggaaacaaggtgctaaaccgtgtggtttcagctccaggtgttgcaggagtggggtcagcaagggaggagggggcaaggtgactaaggagggctgaggcatgtaaagtaccaggctctgtgtttgtggggcccggtggtcctgtctgaccttggctatggagcagctaatcaggcttccccagaggcaaagctgggaaaaccttccaagctgccaagaggggccttctgaagacccttctgactatgggtgggagaacttggcacctacagccttcaccctgaccccagcaggccctgaccccctgtgaactggtggtacctcacccctactcctcttgcacccccacactagtggccctacccctaactgtggccaggccaggggaggagcaactccaccatgagggcttggccctcatgcctcctcctgcccagctctgcatggcatgtccctctggccttagctgccccagctgcatgtggcctcaggccagccccacccagccctcttgcttcctgtggccctgtagagtggctaccaggacccctgctggtgagggcgggtgcgggtggcctgtctccgagctgggctttcctccagcatggtcaccccctcacccgctcagttacctctgatatgctgtgcaaacatatttctcgatgaaatgctgggaagaaaaataattagagtgttgcctccattatccaatttcggattaatcaaactctctttgtcctcggccaaaatctattcatttcccttaaacactgggccagtgccaggcattgatttcctctatgataacaccacgcacgcaagcacagccatgcccagccttgccccaccccgtggctgggacacagaggcactggtggggctgcccttgtccccccaacactgcccacctcctccaaggagtctcctggccacactgacacccccatctctgtcgtggctcctggagtgcttggcctcagtctccagtgtgtttgtcttgccacgctggctgttctggggctctccctcctcccaggatggtgtggaatggatagaggaggtgtggagggtgtggccactgcggtccccagggaccacagggaatgggctgcagccccaggctctgggtgggccagggtttgggggattatccccatcactggcacaggaagaaggccaagggggagggccagggcttctaagggggctgaggggccatgcaatgtatgtggggtgggagcacacttgcaggggtagcaacagaagcccagccccaaagggcttacaagatgaggggacatcctggctcccgggcctgagggcttagtagtggggcagcatcaggatcggccaagtccaggtgggcgggggctgtgcgtctacccgtgtccacccagggaaggccacgggcctttccagaagacctcccagaagtccccaactatcccctccgtgagccacgttgaccgattcctcactcagtcactacgagggcctgggattgatttattggcacctgcttggtgctaggtccttgtgggcacatgggatacatcaatgaacaaacagaccaacagtccctgccctatggcacagtgggaaagaggtgggcgataaacactctaagtaaattatacagtgtgctagaaagggaccatgcttggggcaaggcagcacacgtggtgtggctgtgtgcgaatatgggggtcattttccatcgtaaataggatgggcagggaggcctcctaaggaagggacatctgagccattggatggggagagggcgcggaagcgaagtccacttggctttctggacaaagagttttccaggaggaaggaacagccagtgcacaggccctgagttaagagtgagggatggtgctagagaggcagctagaggcagcatggcaggagtgggggagggggagcatgggcgtgggagtcagagaggccaggcattgcacagccctggtgccctggctggactttgactcggggtctgcccatgtcaagcaagcgtcgggagcaaacatgagaaggtttcaagcacaagtgagacatactctgcctcatttttacaaggatgcccctggctgctggtggagcacagggcacagggggctggagacagcaagaccagagaagtcatactgctgcaaaacagatgagaggctggggctggctagcgggagtgagtggtagaattctggacagtcagggcaattaagggttcccctgaggctggctgggtccagccacaacctgtggtgccagcctcagttctcaaggaaagggacgcagggaaggcgtgctgggcatgtagtggacaccactcatgcccctaggtccccaaggtaggggatgggattgtgggatgccacacatggaggcagagggcaggaggttgcagggcctcaaagacccagaaggtgaaatcagattccccactcaagtgagggtttgatggagtcagcagtttccttccctggggaaactggggagccaggagcctggggctacggctctctccaaggcagcaacctctttgatttggctcttaatgaaggccccacttcttctctgctgtcatggccaccctctcctccataggtggaacctttgcatattgatttatttatttactcctggcccagagaaatatctggcttgatttcctcctgagtcagtgttcctcaggcgacactatcaccctttgtctggtcagccgtggtggctgtgggccaaaagacaggacaggtggctgagggtgtccagagccaggacagcacagggttacagggaagggcctccctgttcatctcatctccccggtcatctcatctccccttcctttagcagaaggacactgggaggcccagccggggcatagcctggggttgtctgtaggatggggacactgtgttcactaaccgtagtccttcctcccatctgctcggactatggcttcaggataggcagagagctttgaggaggcaaagaaaggaggacctgtttctaaggtgagacccgttgcggatctgcaggtgcaaggcccatcaggcaggttgtggggagagtgtagagaagccaacccagtggcctgggccctggttactgtggagtggctgcaaagagcccacaaacacggagtcacatgtcctcaagccatgaatcagtgatgtctttcatgtgcgtatgctctcatttttcaaacactgcaaaagctattgtgataaatgaaatgcagagtcatttacaagccttgaggaaatcttggcgcgcaaaaaccctttttacctctgtcatcagcactcactggattaatgggtgctctcccttctcactgtaaagcatgctggcttgtgtcagtacagggttggccctccagggcagcgggcactctctagaacccccttgcccttccacatgtatccctttgagtccgttgtgattgtcccaaacctatttgtgccagttgtactcattgtaatcacagcctggaatactgtgtaaactggtgggctgtgactgtatagagggcttctgtggaaatgaaagtggttgctttggaaaagcctcagtaaaagccgtggttaggtttggtgtgggcaagccaaccacgagtttggggacaaggagtataacagcctaaagttcagattccgggtcctttgccacctcacttgtgttggaaaaagtaaacgagatgtcacgcaaggtgtgctgtggtttaagcaagaagtggcataaccccagaaccggaaactctgatttaggaagagtttgtgtctctgaaaattgacagatatatgaatgtatgtttatctgagttaagtgaaaataaagtacacgtgtgtcatttcttaggtcttcctgctttaattcacttttcagtagatcagccagccagcagtctcaggtttgattgcaacttttagccatcaacagttattagaaatatatgttataggccaatcaggttataggccaatatgttataggccaatcaggttcatgcctgtaatcccagcactttgggaaggagacgcaggtggatcatttgaggtcaggagtttgagaccaatgtggccaacatggcaaaaccctgtctctactaaaaatacaaaaattagccagccatggtggtggacacctgtaatcccagctacttgggaggctgaggcaggagaatcacttgaacccagcagatggaagttgcagtgagccgagatcgtgccactgcattccagcctgggcaacagagtgagattccatctcaaaaaaaaaaaaaaaaaaaaaaaggccaggcgcagtggctcacgcctgtaatcccagcactttggggggccgaggcgggcggatcacgaggtcaggagatcgagaccatcctggctaacacagtgaaacctcatctctactaaaaatacaaaaaattagctgggtgtggtggcgggcacctgtagtcctagctacttgggaggctgaggcaggagaatggcatgaacccaggacgcggagcttgcagtgagccgagatcgtgccgctgcactccagcctgggcgacagagcaagactccgcctcaaaaaaaaaacaaaaaaaaaaaacaccccagaaatatatgtgtaataatgtcggaatctgcaggttggtctttttcgttgtgtttttttgtttttgtttgtttgtttatttgttttgagtctcgccctgttgaccaggctggagtgtaatggcgcgatctcggctcactgcaacctccgcctcccaggttcaagctcctgtctcagcctcgaaagtagctgggattacaggcgcacaccaccacacctggctattttttttttttttttttgtatctttagtagagacagggtttcaccatgttggccaggctggtcttgaactgacttcgtgatccacctgcctcagcctcccaaagtgctgggattacaggcatgagccaccgcgcccggcctcgttgtgtttttttgtttatttttgttttgcatgtgaaggatcattccataatacttggaaaggttgtaaaccaggagtctacaacagagccaaggccacaggggccaagtatgaggaggaggctgcttgatgacactgcagaactcccacggcaggccagcctggaagcccctctttccccaggactaggattcacaaggcccttggagccccagcccacccaagcggaagagtccagggacaacctgcagggaagtgtgaggttttctagcataagaggacatgggggatgggcctgaggaccaggagatgctggtttcacagagctgaggctagctgggctctcagcctggggtgtgcagagtccacagtgtcttccccccaaaccttgcccccagaaactcccattttaattcaataaggtgtgaagtggtcaagatcatattaaggtggggcgtgagctggctgggatgggaaagggcacgtgggagactgggagaccaggcaggaggctccagggaagttgggagagtgaaggaggagggtgggcaggagaagtttcaggaagaggactctccacacagacagaaggaactggaaaccataccaaaggaggggtccttaggggctagcctgcagctcggagaggggcaggtgtgatgcacatttgagaaatatttgtggaaagcagaagcaagagggctgtgggaggcctggggtattgggggtagtaggggagggtagacccaggcagaggggtcccaggggaatccagtagagctggcccacagagtcccagggatatcacgggctccaggaggaggccatgggtcagcagcgacctcaggtcctgaggcctgtggactgcagggtgacccctttgcaggctgctgggaaaggtcattttaggtaatgctctcaaaagggagtgctggggaagcttccgagctctgtacaaatattttttggtgttcctccatctatccatccatctgttctgcgaatctttcacagagcacctgcttcgagggaagcagagctggtgcttgggggagggagggtagagcaggagcccagaccaacctgcggtgggtaccctggggaaaccacacacaagccattggaggcgaaggtgggaggaggggatatgggccagatgtggtcagggaaggtgcctgcaggaggagccggcagccctgaggctgaaaaaggaccagtttgtggggcatcccttccatttcttccccaggggaagtccagtcccactgccgaaccagcggcacaccacacctgttcaaggtcgcgcgggccaggtggcaggcccagactgagtccactggggttccagggatcctgatgctgcagtagtcaggggtcctcatcagagaaggaggttctccctgggcttcacagggctgtgttttcagccaggtggggtggaacagggcactgtgagtgtggtgggtgggagatgcagccagagaggcaggaaccttgcttcttgtggagttaacaaggagggaggggtgagctatgcaggcgatctttccccagagggcagttcctgggagggtagcttgtccctacccatgtccagtgtcactggcattaaggcaagtggggtttttatcttccccggaagatgtggctttttagtccaaaaatacaagcagtccccaacttaggatggtttgacttgcagtttttcaggttatggtgcaaaagcaataaacattgagtagaagccttactttgagtactcatacaaccattcattctgattctccctgtcagtacggtattcagtaaattccacaagatacgggttagattcttttgtctacctgcaggctaatgtaagtgttctgagcacatttaaggtaggctaggctaagctgtgaggttcagcaggttgggggaagtcaacacattttcaacttaggatgggtttatcaggacataaccccatcctaagtcaaggagcatctgtaggtgttgtatcaaaagccttaaaccatcaggccttcttgcagacagccacactggccaggatgaagcagcatggggaagccttgagcactggatgtgaacatatccttgctcatttttgccttcatccccacctggtcctgagcacctgcgcttcgtggcccatgatgcaatgcagccttgagagctgcagccccgcccttcactaccccaaggcccagtggggagctggacagagagccattcagtggggatgccacagacagtgtcgtgctgggaaggcagggaagtcaggtccctgctctcccagatgagtgtgggcgtggacaccaaccctggctcacttgccagaggacgcactgtctgcggttttgtggtcaccctaccatcgcatgtccaggtgacatcgcacgtccaggtgccattgcacactggaggttatgatgcagaagtgctgctccaggaggccataccaacccccatcctgtcctgggtcccttggggccacctgccactaggtggggagcctcatctggagcccctgagttttctggaggcagctctcaggctggaacccccacctcagataggtggacatggtttccaggcagcttctccccaggctaagcccgtctgctgcatctgcggggtcagctctgggaatcaccccaccccttgatgtcctcagcgattcctcactgctgccattctacatttttctctgtgtcctcttctccatggtgctgagctttatttgaaatggcctggctgccttatgtgctcaccatctccccagcgagaatacaagctccttgacacacagactcagcttgttccccaccatgtccccctgtccccaagcagggccacacacagtggggctggattctgggagagcaaagtattgatcatagcaggttgagtgactgatcagttgcccatacagatctgagggtggaaggcctcaggcctgggcgcacgtgctgggtgatttaggagcaacgggagaagcagtggaggatgctctgctgagcagacaaatggaactgagccagggagagggtgacccactttgctgagataagagatgggctccagcctgaggacaaggggtgcagtgtttataccacagcccaacagcctccatcccttcaacaccagtaccagtgcctccgccctggttgtcccagcttgtcccagcagagagggcctctggccctggttccccatgtaccccacttgtgtccccaggaggcacgggcagtggggacagagcagggggctgcaacaccatcgaaccctaggaggtggcctaaggccacagctatgagtggcactaacccttccccagaggaaggtaatcctttttgtttctctctcaatccttctccttcaaggagaaaatcccagtttggtgccaacgtggctctcacaccctccagcaggcgctaatccccgctgtttaagcaacagccagtggccttgcctggcccctcggcagggtcccgcccctggctagtggcagaagcggttcctctacactgttttgtatttagattacttctgtctacggcgggtgaccctggctttccactgaaagtaggactatgaagtcattatgaagtacattttttaagtaaaaaaggcagtcaatttaaagaaaaatgctgagtaaaaacagcaagtgatacccaggtgtggccaggttaggcaggctgcagtcccgtggggcccagttggagggcttggtgggagcagaggcctgcagactcccagccaggccaccccgggaaatcacctccatctttgcgctttgatttctacagccgtaaagccgaggccacctcccaggcctgcttttagcatgagatgacgtgtgtgagcaaagcactcggcccagcagtggcagcagacggggtggcacggaggtgcagctgtcccctgcgtgtctccagccacgggcctctggacctaggttccctgggcaccttcctctcctcccagtggcctcagccacccgagcaggcacactatagttgaggaaagcacagcagagccacagctgggacccagagtcccctccctgaccccaccatgcccagcttccctgagaaagaccctccccggggcccagcccacagttgcccctgacctcccatgaagatgtgtggaaatggctccatgaagagcctgtgaggacactggaccatgaccagaccactggagagaggggaaatgcagtcatggggctgcagcatctgtggagcccacttcccactgggtggggccagcatgacaggattgaaggcagtgggacagaagaactgggcaacacaaaggacacctggctcctcagcaacagagagctgccaccgaggaggcccctacaggtccaggccaggccctgggaaacccatgatgggacacatggctggggcaggacagggagtgtgcagcttgtcagctggaagcacatgcggctccgataagtcgggcgtaaaagggcagtggaaagtgcttcctcattcggcgaggaggaaacctggtaatctgcaatggccacaggcacaggcttttccagaccttcggtttctaaaatagtatcatggtgggagctgatgtagggacggcggctccagagttgggggcagcacccactctttaagagatgatagaatgagcatggtggctcacacctataaccccagcactttgggaggctgaggcaggaggattgcttgagcccaggagttcgagaccagtctgagcaacatagtgagacccccatttctccaaaattaaaaagattagctgggcgtggtggcgcgtgcctgcagtcccagctactcgaggctcaggtgggaggatcgcttgagcccggggggttgaggctgcagtgaactgtgatggtgcactgcagctgggtgacagttaaaataagataaaaatgcctcaattgagcttataaccgcccaaggggttcaccttgcccgctgcctagacagagccgattcttcaagacgagaattgcaatagagaaagagtaattcatgaagagctggctgtgcaggagaccggagtgttattattactcaaatcagtctcctggagcattcaggaagcaaagtttttaaggataacttggtggatggggggtagccagtgagccaggagtgctgattggtcagagatgaaatcatagggaattgaaactgtcttcttgttcagtctgttcctgctcagtcagttcctgggtgggggccacaagatcagatgagccagtttattgatctgggtggggccagttgatccatcaagtgcagggtctgcaatatttctcaagcactgatctcaagagcagtttagggagggtcagaatctttagccttcagctgcatgactcctaaaccataatttctaatcttgtggctaatgtgagtcctacaaaggcagtctagtgcccaggcaagaaggaggtctgctttgggagagggctgttaccgtctttgtttaaactataaactaagtttctctccaagttagttcagcctacacccaggaatgaacaaggacaacttggaagttagaagcaagatggagtcagttaaatctctttcactgtctcagtcataattttgtaaaggcggtttcaagcttggcctgcaggttcccatactcacgcagcaagtcaagtgatctgagttatatgaaccatctacacgcccaaaatgtgggttcagggtaccccagtgcgtttcctcctgctggtccctgcatgctctgagctgtgggctggcttggggttggagccttacccactctgccccacatccttgtgtgaggaagggcctgtggtcacaggcatcagtgagcctggagatctgtcactgcgcgggcctcctccctccccagaccagctgctgggtgccaaggtggagctggcaggtacaggagccgcggctgcctggataaaaggcgtctcagcaaactggggtcaggatgggggtggggcagtgctgagtcatagccccgcttggggcatgccaggcagctcagcctccacaggggactccaggacagggtgagtggcaggtaggcgcaggcagccctggggtcagctccggtagggtggaaaggacttgttggtctgaaatgggttccatgactcctgttgccaccccaagcctgggacagtggacaccactggtccccacattgaggctagagagtcctgcaggttcagggtgtgtggtaggtatctggggagggctgggagcccatcgggcattaggggtgtggccttgctctcccttgctggccctgtggcctgggctgcctgccacctcttggggtcctagcttctgttaccagcaaaggtggccatctgagtggcttctattgggcctcaggcatgactgcctgtgcctctcccccagtcacagtctgggtacagttccgtctcctcaacaagcctaaactatctccctgggggcagggtctgtgtgttgaaccatcacttcgtcttggctcactctttccgtcgcccaagctcagcatggggcaggctttcctgggaggtgaggagggagggaggcaggtagctagggacctggagagtgaggggctggactgccgtctctgaggaagtcaggcacagtgatgagggagctggtctataagctgataagtcttcccgcccctggcttagccggcttgggcagtgagaccttcggtgaccttggctgtgggctgtcttcttctgcctcagccgggggcactgactctgtgctgtgctggctgttgtggaggaggccttgagcaaagctttggggacagcctggaggttacgggcagggcaggctggctcccatggcctggtgtggtcctggcgagctcaggctatggtgggtgtgaccatgggtattatgttgccccagctctatgcctagcagcaggctgagcctccagggattgtgcctggggagggaagtggttcctagagtggagggcatccaggatgcaaaggtcccaagagaggtggcagcactttccctccatgaccatgtacccatcctgactcagggctatcactcaacatctgttacaggaacagacttgagagggccacgtctggaaggagggtgatgagggcaggccgggcctgctggacggtgggtgagaagggagggtcttgagggggatgtccatgtgtgggctgaaggatctgtcccgaaaccacaggaagcaagcggccctcagcagagggttcctgagtgggctcagggcttggagatcgtgccttaggaatctttgggtaggtgagtcaaggaccaggatggagctccttaagagcctacagccaagagatgctagtttcctgaggctgctggggaggaggcaggcaggtgcagactctggcctgagcacagcccactagggcttcttggcctctggctgccagcatgtcgaacctggtgcctggccctatgtcgcactaagtcctaagcgacctcctggtgaatttgccacacccttcacgctgcaaacactacacatctgctgggggcgggggccagggactggatactagctggtgttcactgatacagtccactcatctgtactgagccctggccataagcacagcagggtcctgtaccacagggacagctgacagtccccctttcccagtacctgccactttctcctaatatgtcccctctccaagagcagcccctgcttcagcctactggctggtccctggagttccctgatcgtctccctgttcccacccagccgccactccatcaccaggcactgtgcaccgtacagctcacacatcttgcagagcctcactgcatccacttcccccagccctcacctgtgttgctccccttttatcacctggatgtttgcatccaggagcctcctctggtctggcttcagcgcagcagccagagggatgctggtcacacagggcaggtcatggcacttctcacccaaaccctggctggctcctgactcgcccttaagtgacctcctaccctcttggcaccagccacatggcctccttcctgcccctcagactggtcaggcatgctcccacttcagggcctttgtgccggtggttccctcatccctgatgcctgcttgcctccctccttcaccacctgttcatactcatctcttaccaggaggccagccccacccacctttgctgacttgcagcccgcatgtgccacccccaaccctgcccacctggagctccatttccactgtagcactgggcaccttctgccacttgctgcttatttactgcctgtagtctgactcctgccctcccacctgagcaaaaatagggaatagatcttcatctgcctcattcagcagccccagcccaagtgccagaatcaaagccatggtttagcaagtaagtgtgggatgctggagagcccctgacccatctcccttctgccccagtcgcctcagcctagctccacaccacagctggttcctcctctccagggcatctctgctcccaggatgccacatgcaaccacatgcagatgcccacatgcaccagtacacatgcagctgcacacacgcacaaccacatgcagacagaggcatggacctgtgcatgcacacccaaagatgtgtacatggacctgctcacagacatgtacatggatctgcgcgtgcacatgaacagacacatgcacacactggcatacaagcaaccagacacagacacatccatgcacctgcactctcacagacacaaacagggacctatgcatacacgcacacataccgcaatggacctgcatacacataggcacctatgcatacacgcacacataccacaatggacctgcatacacacaggcacctatgcatacatgcacacgcaccacaatggatttgcacacacacagggtcctatgcatacacacacacaccgcaatggacctgcacacacacagggacctatgcatacatgcacacacaccgcaatagacctacacacacacagggagctatgcatacatgcacacgcaccgcagtggatttgcacacacacaggcacctatgcatacacgcatatgcaccgcaatggacctgcatacacactggcacctatgcatacatgcacacacaccacagtggacctgcatacacacacacgcaccgcaatggacctgcacacaggcaccacatactgccacaaacatgcaggtacacacatggcttaaaacctttcagtggcgtcctgtttctcttcagtgaagaccaagggctcagttggacttctggtgagccctgccccttcctcttgcctggtacctctctcctcctctccctcagtccagccactctgaccttccttcagttcccctttgtgttagggatggtttgtccctttcatccctaacacacatccccacacaccgcagggccttacagcatgttcctcctctgcctggcacactcttttcctggcccattcctctggtatttctagccatgcccagaggcactgtggtggggggtcctgggtgttgagctctagtgatccatcagtggtttctgggccagggaacaatgtggtcatcaactcttggcctttgtctcttggccaaccatcatcaggttccatcctgggacttggggagtcctagcatgtccagtaaagcccgggttagactcagagagagggctggctagagccttgtgtaagagccaagaagtcaagcctcagaataggtgggactgtcataaggtcccatttgaaccacagccaggctcccaacgcaaggcttccttacatccgtgcacagccctgtcccatgcgtggtgcccctgcacagggcgctcatacccccaaacacaacacagccccacagagccgcagggagaattctgggtggggccttctgcttgtttggttcaggtgatctgaaagacgagggtcctcaagcaggggacctccccttggttgtgactgttcgtcactgccccatgcaggtgacagacttggccctgatgcatgtgattgctacctggcctcagtttcccctttccttgcacattgccctgtcgttgccggcgcacactgatcgaagactgcatgagcagcccttagctccaggcttccagacaacagcagttcagggcccaggctgccagcccagtgtccccaacctgctctcctgattccccagccttggagccagggagcacatacatcccaaagcacaaatcacacatccttggacagagcagcttctctgcccaccactggggacagaaggggcgcctggctgtacctcagattttcaaacgtggaattgagaagaacagtcatgacaacagaggacacctcccactgggttggacactgccttctgaaaggagcatgttggcttcctgctggaatgatggtgctggtagggagaaccctgggtccccaggcagtgggctgagggctttggacacctttccacacctaaggggctgtcaggtcgtcagcagggacaagggagcagccacagggtctccatcctccatgcgctcatggttcgtgtgcatattacacatatcatgtacatgtcatctttaagcagatgttctgcccactgtgtgctggagtgggagggtcatctcaaggcttccattctcagatgtaattttcagcctcactgggattgggctgagtgactgtttaatcactgccctcttggcagagatgtttctagggcgttccctggtgcacttctcatcggtggctgcctggtgaagcgggaaagttcctcagcctctccattgattccttccctccctccctccttccaccaaccagtgcttactgaacacccactgtgcactgggcactgctctgttcccagtggggaacgaggccaggacgggccctcctcacccgcactctggctgggggtaggggcgacggcagcacacaaggtcatgtaggtcacacattagctgagggctgctatggaggaggaggacagagggcaaggtgacgctcacagcgacaagcacagcagggcagtgactgctactggctgtcactctctgaggaccaggcttgtgctggacgctttactcttcacagatacctgtggccagtgagggacaggctctgagatgggagtaagtcgccagaggccacacaacctgggagaggcaagcaaggcatgaaggatgagaccaccctgagagtggtgggggtaatatcagggtctgaccaagggaaagaggcggcattagagcctctggctgtcagaggctggcagggctagggagcaggtgtgagaggccaccaccactgccaggagagaccagaacctctgcccagggagaggacagcccaccaggggcctgcttcaaagcaggatcgccaggactagtggtcaaggtctgtgaggggcaagggacagtgaggggcacggatggctgctgggaggatgaagtgccatttgctgagggtttagcaggttgagtttcagatgctggtcacacccaggagttgagggtggggccttggctgttggggtctctctgcctcgggccttcccaccccagggcctgtcacagagttgatgggtggtattaaaggggcgaatgctgcctgtggcaggatggggaggctgcgtgggtctccggacagggacataggtcagggaaggagcaagaggggtgcgtgtgagttgggtggggcctggtgccaccctgggctcacagccggggaagaagcctgagctttgagctgcccctcgtgtggggaggcctggcctaagcacccggcaaagtcacaggggcatcctagggtgtgcccctccctgctggcaggaaaggtggatggggaggccctgactcgcggggttggtgaaagattctgcctgaggcctctaggccaccctgccttgccctggcctcggtgattactactacccttgggagccactgtgacatctggtctcccaggtggatttccccgcagcaccacgtgcagcccccagctccttggtctcagcccaagcccccctctacctccttctgcaggagtgaggcagcccctgcccactgtgcttaggcacctcacggtgctcccacagcctgaagcctccaccttgctctggtccctgcctatctgctggctcctgggctggcccatcagagtgccctcaagggaaagcaggggccaggtctccctcctggtgcttttcctccctgtgatcagaagtgacccagctcctgcgggggtaatgagagtcagggaggcgctcagttatcccagggctgggccgaggcctggccacccgtgtaaaacagggcaaggctgagctctatcagtgctgtctgggagaagggccccagggggcatcacaacagggtgaccttattgaatcctaactggatgcggtagaagtgagtccagcatgggggctgggtgggcagaggcctcgcacacaccctcctctccctcatgcacctggcttcaggtggactgtccaggcaacagcagacatatgtgttacaccatggtgtgggccctacagcgccccatggaggagagggggttggatggattgttgccggctcattttccaaggccagtctctgctgctttgctttcagaagagctccctttcactgtccagcctgaggtggggctgcggggaggaggctcacgcttttctctgtgtttggcaggtgaagggctggatgcacagtgggagccggaggcggggggctgcagggagcacaccagcgaccggccctccaaccctccagccactcagcaacatcgccacagcaaccagcaaccagacggcagcagccgaggcaaacacaagcggacggcttcccaccgtcgccgaggacagggaatgactacggcaaatcaggccactttgccaactagggaggtggagtgtcactagtggggaggggcggccaccgcccgctgcacagagcgccatgccggctggagaagaggcgctggggcaggggctgcagtgtggctcggcctcacccccctgctggcactgagtgcctccagggcagctgggctcttgtctgcctggtctcagtgtcccctgtggcaagagggagaggtgccccatcccgtgctccttgtctgggcccgctgctgccagaccatgggatgtcggcaaagctcagaggaaaaagaagcagcccggcggtcccggagaattgaccgccacctgcgctcagagagccagcggcaacgccgcgaaatcaagctgctcctgctgggcaccagcaactcaggcaagagcaccatcgtcaaacagatgaagatcatccacagcggcggcttcaacctggaggcctgcaaggagtacaagcccctcatcatctacaatgccatcgactcgctgacccgcatcatccgggccctggccgccctcaggatcgacttccacaaccccgaccgcgcctacgacgctgtgcagctctttgcgctgacgggccccgctgagagcaagggcgagatcacacccgagctgctgggtgtcatgcgacggctctgggccgacccaggggcacaggcctgcttcagccgctccagcgagtaccacctggaggacaacgcggcctactacctgaacgacctggagcgcatcgccgcagctgactatatccccactgtcgaggacatcctgcgctcccgggacatgaccacgggcattgtggagaacaagttcaccttcaaggagctcaccttcaagatggtggacgtgggggggcagaggtcagagcgcaaaaagtggatccactgcttcgagggcgtcacagccatcatcttctgtgtggagctcagcggctacgacctgaaactctacgaggataaccagacagtaagtggggccgggggttttcctctgcttgttcctgctgtcgtgggttcctggaagcaagaggactcgtgaggtccaggacagtctgcagccagaaagggaaccaggcgcaggcctggccctgctgcacgataactgaggcagctccagcaaggtgggggcagagggaacagggtgtggagtgcaggtgtcatgtcccatgcctgaagtactcagggtgtggaggccacagggcaagagagtgtgaggctccgccgggcatccatgatcaatccatgtgatagtttggcaaatccatgaagctcctgccagcaccagtctcctaccagcatataggtccaggaacagcagccacccctgcaaccccatcttgagtctgcaaatctggcagagatggggttaagagctgtttagaagggataatcccaggtcctggtggaaaggggacgacgtaaaagcaggtgttgggattctttcacagtggcatgggcgcagcccgagggagacctggacccagtgtgaagcggtgggggcttgagagtggagttgctggagagggtggggagccgggtgaagcagcagggcagtgtgctgaggcccagccaggacagaaggtctagcacacgaagggggccacagccaggagtggcagcggtggaggccgtggcaggcaagggaggggctgtcttgcccagcaggattccctgagcacagatttcaagtctgcccttaagagagaggcctttgaccctggggatgggggagtgggggcaaacaaggagtcacgaagttgtgggtaccctggggctaggggagggtgatgctgggagacaagggctcagcctctccacttgggagcactggcctccgaggtcactccttgcttcacccagtcctaaggcaagctttattctttaggttcagcggagagcaacaatggttctagctttggacctgtgccccagccagggaacctggacagctctaggcagtggccatggtgctaggagcctgagtgttctgagagagaggatctttggctttcctcaggcagctggggaggcgggcttgcctccctcccctcctcgcatcaggggtctccctggaactgtgcctaggtgttgatggtgtgcctgggggaaacgaatgacggacgggcaggcaggtgtgtacgcaggcggctgcgtccaccctgttcccagtgtgtatctgtgtgctctccagggttctggccccttaccctgtggttgccacaagttcagccccatgtgtggttctgggcagaggggacatctcagcagatgagtgaggtcaggctcccttgatgaggcatggccgtgggcagagcgcttggggctgagaagctgcaaggcaaagtgaggtgctcaggccagacccttgggacagtgccatggtgggtctgccagtcacacgggcttgcgccactggcctcacccatcaccacagtggcaggcgtggcaaattccccgggcaccaggcctggctcccagttgcatcctttgacaggccgtgcccacaggtgtgctggacacaggaggcaggatacctgggtcctgagtcagtccagtttttcatggagggctttggctgtcatgtttgctttctgaacttgtcagtgaggagatgacccaggtgtcttcacagatgggcccaaggctaggcctttgcctgcctgcagccctcttggctcttactggcctgtgcctgccaccttgctgcctctctctcctctccttctgctctagccgtggtcagcttgttttgctccagcagtactgctctgtccagccttaagcttgtaatgatcctgatccctgcctctcgtacccctgcccttatcctccaggtctcatcccaagtggcgcctcctgggaggccttttctgacctagcccggcacctgcttactcctccatctagtgatgtgtgagtgagctcctcggggcaggccctagatgggctgggtggcccctgtggggcctcacatctctagctttccctctcccaggcctgtccctggggagagccatggtgggcagccatgggcagggacagcagccactggcctggtctcagggatccctgtgaggttccaggcattcaaggcactttctaaagggaggggctggcagccaggctggcacacccaccaccatcaccctggtttctgcaggcctggggaagtggttgttcaccagaaaaggaaattcttgatgagaaacccaagcgaggctggaaattcactggattccaaatgattctgacctttcatgctctaccagtaatatctggagatggaaaacaaacaggctgcagaggaaagacaatcccctcccgcgattcctcccgcaggctgggctggccccggaggtgagctggcccccagagtggtgccggcagtgaggacagcccgtctccagccgggccagggccagagccagtgctggcacgggctggcacagggctgccactctgctctctccttttggaacgtgctgaactgtcctccctgggccctgtcaaaggcaaggcagccaagaacaggccatgctcgttttcacaaaagccgaatgaaccttggggcccagtgccagggctctggacacggctcctccatagccctccttccgtgctcagcttccaaggcctcatcttccctgatgctggcagtgcctccccacccccacgcctggcgaaggagccacagccccccggcccacccgctggcttctgcgtcagcacgttgccaaggagaacgtcagtgtctctgggctcccgggtgtgagggctgcagtgagtgcagggcagcacctcagagcagggaaggcagatttccgggtgtctgtggagcatggcagcgagccacatggggagccacgcccctccatgcccacggttcccaccctcgtccgaaggaattggcagtcccttgccctgactagggccaagtcctgcaggtgtgtcaggcaccccagtgcccccaagcccaacacccagctggggcttcctcaggcagcacaggaggcctgaacacagcccagcaacacaagggggtttttctggcgcacctgtcccctgaatgatcctgtggggcagcagcgcctgttatttttgtcacagatcgaggcactgaggctcaggcacacagctggcgctggcgggcccccagccctcaagtccacaaggacagctcctgagaggccatgtgtcacaggacccaccacgggcctcccacttagccagagccatggcagaggctctgcccctcgtctttagtacattcacacaagggtcagtcagcaaagacagtcactctgctgccctaggagggaaaggcaaagtggagaagctggcacctaccagcccacactgagggacagacacaggtggctgtgaccagcagagcctgggtcttcactcggccccactggaggcacctgagggggtaggtgggcacttgttgcccaacctctgcccttgcggatcagctaatggactctgctggccaccaaatggtgtgggatccttcagaaggcaagattaaaaggtctagttgtaaagcatcaaatgttctcatgtggaaacccacagggagctcactgcccatttcccgacggagctgtcagcattcccagccctgtggcgggtctgttttgcacctgtgatggacctgctgtgcaggctcaaggctcaggctggggccaagtatgagggtgagcacaactctcccagcagcacagggaactgggggacaaggaggaggcagtcacaccagcccagctacagcttcatttccacaaagcctctgctaccagggatacctgccctgtctttctagagctggcaggcagcagttcccagcagtgtccccattgtgctttcatctaggacccacagtagtcacttgggccccacaggcaggctgggtcacagcagggttcaccgtgggaggcctggtgtctctgccacttatctgagagacagctggtcaacatgttatcagtgagggtatccaggggacgggggacataagaacatgccttttgtggggcaagttctgcaggtggcaagtgcttgagcagccagcctccaggcaggtggtctatgcctggccctggatagtggtcccttgtcctggggccattggcttcctgaggaacccctccccactccagggcaggtcagcagcctcagcacaccacgagggcaggtccacacccacccggcacagcctgtgctctgagcagagggcctggcacacagtgggtgctctgcagactttgtggagcgggcgggaggcggtaggcttgggaagagctggagctccagagccctggcttctgggtgcagagcagctgggacactcagcccttcccaaggagaccctatgggtgctggtccataacaggagtgtatgcagtaccctgaggaggggctgcccaaggccgtcctgtgaacacagcgtgttcctgccaccctagcgctgtggtttatcatttagcccaaaaagggtgcttgttttagtgcttttaaaatggagtttaaacatttgtgccataaaatggcgtgttgtgggtgaaacaaggtgtttccagtaagacaggcttatacctattgatgacagagctggttatatttgcccaaggagggaattacaaatgggcaatagccagacacagatgataccctctccccagcataccagggcttagattgagaagggaccttatatatcctttagtgttcctaaccagccggctttgcagatgaggaaactgagcctcagagaggttccttcacataccgcagggctgagactctggctctcagggagggtcctggcactggcccctgggaattccagtggcccccctcttcaccatactggtcccacatcctgtgggtgctggggttctccagcaagggccttgggggtatagactgggttccacccttggagctgctgtgtagccagccttccctcaggagagtggaggacagtgacacctgggcttgggagaggtgagtggctgtgaaggttgacactcccctcgtccccttgtctcctggcctagtcagtggcaggaccacagggagccctagcagaacatggcctcactctgcctcctgttcctgacctggtcaagggcatagctccaagccagaaggcctgccgcccttttcccgacacacacaggtctcccaagcagttccttctgatcttgcaatgtgccagggccacatgcagtttgtctgcagcatcctcaagttatcatgaccctggaacagcagagcctcctgaccagatccagaggcagggccaggctggcacactgggctcccaaggactggacagcccccatggcagtgcagcttgagaggctccacaggggtgggagacacagaggaccaagcccacagcagcaccctgatggcacctcgcatggcaggcatggaattgggagcagggctcagctggccacatgatatccccagcccgcatccctctctaagcttggcctggcttcctctctatggcctgttatcctacccgagcactggagcgatggggccagcctcaagagggctgggcacacacctatagctgggccacccgtggcctagaggccccaccaacacttgtgaacagcccctgccatcccttcagcaccggctccccgcatccaagttcccttgcctcattgcccaggactcagccttaactggggctgcggccacctcagtgggccttcagccgctctgagcctgtggccagtgctcagtgaatgatgggtatctgctcgcctagggtcccaggctttatgcgtgaccccatgggatgctggctcaagcccaagatgggagggggatgagcagggaggggtggagaaggcagcatgtcctggcacctatttgaggcccttgctagcacttcagtccttgggttagctccttccttcctctgctcccagggaggatgcagccacaaggcccctgtcaaaagcagctgctcctttcctgtcacactgggagcttccaagggtggggccatttcttagcccgccttgtgcagtggctccttgccctgggtaggtccttggtcagaggtcagccacaaggcaagaggcggcagggccctgggctcaagccctgctgcttgggctgcccccacacctgctctgcctgcagggccttttcctttggcccccaactcctcatcatcatgaacctggtggctctgtcgttcagtgcatcagccacccctccatgatggtcacctcctgctgtgtcactagaggccattcccagggcacaagctgtcactgaacacagcagtgcagcagccaggaggccaaccccatcactctgtctcttccaccatgatgacgttgtcaggtgccttggcagaacctccatggggatgcccatggtgttcctcagatctctcagacaagtgttcctgccacaacaggaggtcagccagcgtgggctctgctggggcctcctttatgggaaggcaggagtcagtctcttgccctagtgctggtaagccttgagggaggagggaggagagaacaagagagttctcttcggcaccatgccaggcagggctgcttcctgcagaggagagtgctgagacccagggctagtggtggcagagcctccctctctgcatgccagggcagtgaggggctagagctggctcatactggctcacaagagctaatttttcaattttcaggatgtttgtgagctgtttgacattatatttgtggcttcaaagcagccaggtaggagtaatcacaccccaggaactggcaaatactacaaaacagttctactcctccccagcccccgcctccatgccagttgttagacctttaccagtgcaccacagccagtgactcccaagcatggcggggagagtctgccagccaggctcagtcactggtgtatggcaggattgatccgctactgccatcttactgaagaacccgacagtgtccttgcctgtcagtctcccactgtgcttccccagtgactcccagctctgaccctgtggccgcgtgggttgcatctgttcgtgtttaccccgctggagaaagggaatttgccagagcggctcttcacttgcctgcctccctcccgctcttcctcggcagatttaagagaatcctactccacagagagcaaccttgcattggctaacacgagaccacaagctgggggccatctgatgttctccatctgagaacaagccctgtggcatccttgcaggaagcagtccttgttcacccagtatgtgtgggccctgggcctgacaaactcagtctagggacagaggcagtcctatcccttcctccctcaggtcagctggggatggcatcaagcaggccctggaggacctgtgtagccagggctggcctcaggctggcttccccagtgcctacaaatgctggccgcatgctctctgtgactggccctgagcctgccctaggaaacagttttctaggtgcagagaagccaggaacaggtgcctcctctgtcccaaagaccaacatttgcaggagagacgggggcctagacgttgggagcaggcctgcacagattgggatgaacgtgggggtggtgatctgatctggaccttgcagaatccagtcaaggctgtgggggagcagtggggacagtcaacaaaggcaggactgagggggctgtcgggggccatggagagcacagagctatgcacagtgccctgcagcgggatgacggaggaccaggcggtgtaaggtctaagcaggcagggcaaggtcgcaggcacagtgtccagtccccagtgtggcccagggtgggtgtcgctgcctgagcgccctgtgatgacggagccagggttcagccccaggactgtgtccctcccagtttatacacctcctgctctgcctcgtgatcaggctggatgctcacaatgataccctgtctgaactgttccaagagcttcagggcagagctgcttcccaccccacatcccctcaacctgcatcggctaggcttgcccaggccagtgggtaattaatttcctgagcgcattagctctgctcagtacacacacatgagaacagctctgggttttaagacacagattactattgttttaagggatttgtataatccagtaactgaaaaacaattttccactatctagaacagactccaaggtggaggctaagagtgctgggggccttgctgacttggggatccctagtaaccagtgtagatggggggatctgccactcaggggagtcctgtgactggccatgaacaagacaagcagtgaggacaggatgcagcagcaaggctctgtgctgaccggatgcatagccctcttcacctgaggccccactggctcagtctagtttctggagggattggaatgacagtcagctagggtgcatggccctgggcatctcaggggggacacccagtgttggccagggcagagtgaaaggtgtttcttctctctgcatgtggctcccgtctggatagtggacaagcttaggccagcccaggagcctggctgcagctcaccctaatccctgcttcatcacacctcgtggtggacatgtcctcagctcaggtactttctctaatttcattaataatgaaaccagagtcgactgggggccctgggccttgtatcctaaggttcccagcccaggccggccagggccacagccccacacaccttttcctggcctgtggtgaccaggggagaagcacagcagcatcctgaccaagggggcccagagcctcgaaggcaacttggctcagctggaggagtgactatgggcaaggtcctgccccacagggccacccagctcaagcagtaacaacccaaatatgtttttttaaaggatgaatatttttgaaaaccatctttttggccataggcagaggttccccactgggatctctccccactacccccagtttctcatgtccctcccaggaaagagcctgagcctgctgcagaggggttcacaagcccttgagcctacaggtgtgggtccgaggctgcagtgccagcggctaggagtgcagagtgcacccaccttgctgaacaaagcaaaggcaaaccaggcaagggtgtcggccttgggttcctggggatcctctggagctgaaactaggaggggtttctcacactgtgctttcttcgcatggtgatggcgtgcaagctcctggccaggcctgtgtctgtgttgacagcttccaatctacaacacacctgtatcatgctgtttgttaatttcccttcagcgactgacactggctggtggggagcaggggtgcaggttacttaaaagcagcaagatttaacacaaaaacaaataggagacagttctcagctgaaacagaagtggactggggctttggaagaggccagtcctcccagttgggcaggagagcttatggggtcaaggtgagagcaggtgggacccaggtgctgagggtgcccacggcctccctttctgggtctgggtgtgaagccagggagcaggacacaggagctccaggccctttcggagcaaatgctcccaccatcttggaattttctgtcccaggactgggagtctttgagcattgttaaggcaccacctccagtcacgtgactcccgccacatatcacacttaccctggggctctgcctcctcagcaactttgaccaacacccttgggaatacagaggctcccatttggacctaagaccctgcaagtcagtgatggttgagatctggtgagagcaaaaaagcaaaacagagtgacatgagggtaaggggggtggcgccttgggcctgtgctggagaacagcagccacccacctgcagggctggacaggggtgccaacatcctggaggctgcacacagacttctgggagagctctgcccagtgggtgaagcccagctgaggcatgagaaagtgctctgtgtacagcaccgtctccatctcacactgggccctggcactgtgggtggggccctggcctggctgtggcccagggtagtcatgtggacttgtgtccatctggactgcccaggtgaagactggcccagcagcacagttcctgagctcctgcccctcccctggctagtgaggaggtagggcagttctggaagtactctgaaggctcaggctgtaggataacatgtgtgtgctggctgacaacagaatagtggaaatggaaggcccagagacgtgagcggttggcagagcctggcgcagggcatgctggtgcactgcatgcacaacctctaagcctcccagcccgaaggggctccccaccacacagatgaggaaactcgggtttcaggaaaagttgtccctgtggcaaagtgggggccttctgacctggacatcccgctgctgcccaggggaatgggcagggctgggaagcagccacccttgccattactacgggtcaccccaccccctccacactgcacacacagggaaaccagggagggcagacaggactgcccaggcaaggtggcaaagccgaactgctgcggaaggcagggagcagcacgctcagctgtttctggcaggttcagagcaagggcttttcaggccattagggcctgagctagggctttagcggcagcctgttatcttgtttaaacagcccttgctgtttgaggtgccaggcttagctggtgctgttactatgagcactacagttgtcaccaggcatagttgcaggggggagggggccaccggcaagcagaggctctgacttctggactcggctggaacacacccctgccctggcccccatcccagaggagccccatctgtcgctggcctgggacctacaggcctgagtactctgtaaaatgggcccctcccaagctgcctgtgccctcctgagctgcctacatgggcagctgagcagccctgtgcgggtgggcaggagcggtggcctttcttatccccagggaaaagtcgagggcctcatgaaaacccagggcctgagagtgtctgaggacaggagttgtggccaccccaggttgtcaatcctcctgtgccactcgagagtctccacttcagccaggcaagtcctgtgaactgggggcctctgtctgcaggtggcagcagctggggtgtagggagcagaagctggggcgggagcaggggtcccaagcacagtgttccagcaagaagcaccggaacccaccaagggagcgcagcagtggagtcgggtcctgggcctctgcacacagaaccccagggggttggccgcagggtgtgaaaatcaaacccacattttcattcaccagaatacgggatcagatagttcctgatcgttttaaagccggaagagcacctgcttatcaaatgcctcttcagtctgttctgccagattgacccattgaccgacgaagccacagtgaggaaggacacagaccagctgtcactggagggccagcccagggcaaggcctgctgcgggggaggaaggcccagcccgagtcccttcaaagcctcctataggtgcccatcacccaccccagccacaccctaggcatccacagaagtggcgggtctgggtgtgaggcctgtgccccccgccctgatccagcccatctgtgggccaggagcaggtgcatctgtgcagaagggtggggccaggggcacacaggtggggagcagccaggcaatcccaacccctgcccctgtacacagctgccacaccaaacgcctgcagcatgtgccatctggccttgcctgccatccaccccgtgctgggcagagcaggggagagcggtccccaagcagacagcactgctcataggcaggccatgggcaatgagaacaggggccaatggtgctaaaagctgtgcagcaaattaaaagggttggggttgtgactagggcttacttcaagtgaaggagtctgatagctgaccagctacacaaacccaaaagagcagcccatgcagggtagcacagcaaaggcctcgaggtgacagagacggaagcaggagtcaggagacagccgggagaggcctggattacacagcctgccatggaaggcactggagggtttgcacagggggcaaccccagagcagaagcaggtagatggatcctgaggagacatgaccatggtagaatgggaaggagattgtccaggaggtgccctcatggggcagaactcagagccatagcccaaaactggaccctgcatgcaatgtcccagggccccagcttcctgcctcataagctgtgtcatggcctaggacctttcttcccaggcaggagtcagctccacctgctctctggctggcacagcctggtgctggccaccccaagtgttagcatcctctgcctgctggagaggtggtgtccctatttggggactcagtactctgaagtcagggttttgccatgctcttctctgtccttcgaggcaggagacatgctgtgcatgctacaggagcttaggaattgtctgagggtgaccagtgggggtccagaggaaaggtgctaggaagacatggaggcttccaggggaggctgggcctgaagctcagctccatatccgatgtgtcatcgtgggaagagcagtgtcttcatgaggcctggacagtgcctgggtgggagatagctccagcctccttggaagacctattgaccacgtttctcttgtgacgcacttcactgtcacccagaataactgctgtctcacagctaccaggacccgagcctctggggtaaggtagagttcaaggagaaccaaggcagcccaagtgagcctggcagcagagccgagggcagccccaccaaagccacggagccagccctgctggcatccagaggccagggtgggcctgccctcccatggccccgagctctgcccccaccctttaggattgcaccctgccttgttaagggatcagctgctgctcctctcaggtctttttgggagtcctgaatctgaagtgagcctgggagaaagggagtcagacaggagaggggtgggtgctgagccaagtgagggtctcaagaccaaggggaccccagagcatgggtacccagggcctacacttgggaggcctgtggctgggccaggaggatgaaccagtgtggagttgagagccatggagtggcagagaatgggtgccaggagctgaggtgttcaagctggaacagagccctccgtgcaggcagggccgagcctgtctccctcagcatctcagatgctcacagaaccacgggggcagcagggttcagtgttaaaggccaggctagaggaatggaaacagctgccccagccctggaagctgtgggagtggtggttgccctgcaagagaaggctcagagcataggcaggccttctgctgggaggcaggacccagcagttgagcaggtaccagccccccacctctcagttcctgaggctggccgtcagcaccatgtgccctgtgctgtccccgcagactggctccagggacagacaggagctcactgagtcattaaccctcaatccaattctccaatctgtcaaggtagcattgaggtttgcgggaggaagagggaagcactaaccagattggactgtaagtgaccctggtcatccagctctgtccccagacacctccccatttcctgaggctagtagcagtgggaggatgaccaggcctgaggggtggttcgggctgtctggtgctttccttggggcaagggtagtgggccaggcaaaggggcctaggcaagccaggtaacccctctgagcaccactttccacatctagaatggaaatgttttgagcctcgtgagcccaggagcctctcacagtcacttctcggaggtgaacagaactggagggcatcacggcagcccccacacaagaggaagtccagactgacgaggccacagggtgacaagagcgagccacgttctggggccctcccaccaggaggcccaccccacccatggtgctccagccaggaacaggtcaccagaggtcctcccctctcccctgcccactgccctgtctctcagggcacagcaaggcaggtccttaaagagacagagggagagcagggtaccctcgctaccagagaccctctcccaccacctgagcagatgggcagtagacagtgtttggccaaccaggctgtgtgcccctgtgggcacctgccccagctcaagggtcagcagcttcacctgccactggtctgctgtggtgtgagactctgagggtgagggtgtccaccctggttgtcatagaaacagcagtgcgtctgcagagagttcatgccaagctcagcagagggaggaagcagctggcctgggaggcagctgttgtcattgactcctgagagctcagtgttgggaaggacccaagggcccaccacactctgaggctggcgagcacacggggcaactcaggcctccctgcccaccatctttctttgggcagctgcaccatgttgtctgtcctcttgtccacttggggtcagcgacgattccatctaggtgctgggtgaaccaagcacaggggtgctgcctcagagccacttcgaatgagggggtaggatagcactgggattccagcaggcgatcatcatttgctggggggcctgcgcgccttccctgtgagcgtgagcaggaatgactcatgcctcctccacctgctctcacactgagcctctgccggggagtggcctcactgtctgcctggtttttgtctgtctgcccctttgtctcccagtcccattacctgtcatgcatcctaagctcctgaggacagagaaggtggagagtagcagagccagagaggctctcctgtgacgtggctggctctgtaccgagcagggggtgcggccacaaatctccaagcccaggccaggggagagaggcaagcgcactggactcggttccgcctagtggcaaagaggcccagaaaagtctcaagtgcttgggacagggccccatctgcatgtgatgtgttggggcctctggaaacggagatgccaaggcagtcttctctgaggtcagtggtgatgccagagaggtgaggctcaggccattgccagctgcaccagagacaccaaagcactccagggtcccccaaggtcactttagtagaacccagtgaccatcttggacaaacagcttattttactgaggcaggagctgcggcccagagcagaagtgacatgcccagggtctcactgcagtttggtgggagaattaggtttcagaacacaagacagccagtacctcccaggccccttcctcagggagccagcagggtcgtgggcaagcggccaggctccacagggcaagcccctttggacttaaccctgtttgtgacagccctggtccctgacagtcctcagatcccggtggcagtgggcagtgggctgtctgaaaccaaggtgctccttatttccaaaccagaggtgtctgatcacagagtgtgtcactaggagcatgttctgagaagccagggagcctggtgcccaggttcccatccttagaccagtcctctgtcccttgcagccttagtctcatccacagcaagactggagccttgggggtaaccaggaaaggacaggcactgcccctggcattcatgcagggaccaggagggccagaacacaggcaccctcagcctcctgtcttcaccccgcagcccaaaggagggctgcctgacctccgggcctcacttctctcccagcaccaagaaagaggttcccagctgcatttctggtttctgaggggcccttctgcttccccagctgccacagccccaggccctgcctgggggtctctggaggaagcagaagaggcatccttcggccccgccccaagcacaccaggctctagggcccagtgctcaccaggccgtttgctctttgcctcccaagaccgtgggaggtccagggacctggtcagtggcaatgccttccaccaggtacatggttgaagaggtgcggggagcatgccagggtgcagccaggaggccagatgaccacaaccaggggtatgacagccctggacacagcaggtctgtggccacggcaggagggcgagatggacacttagcaggaggctgggctgagctcctggtggagtcagggtgggactgtggcagggagacccccttctccagcaaggacagggccacttcctgagaaatggagcatcggacaaacaccagcggggtgggaatggcaagtgctcaaggtgagcacgatgcagctgcgacctgtagactggctgcaatggggagcctggccaggagaagccagagacggacaccaaggtcagatcctgaagcacagaagaccctcagtggggatagggacctggctgcagggagcaaggtggccagtgtggacccatcaggaaggcaggggcctggtctggggaccccacagctccagctgggcagagctaccccatgctgtgctgtgccatggaataccagccaagagaccaggagcagggagcgttctgataggaacatccagctttcaggtctgacgtggcccattttaccagaagaaggggacctgctctgagcatagcagccccctctgcctggaacctcacagggctcacctccaggctagcaccctgcccctgcggctgaccctggccaggaagacacatgttagacagctggctggacttggtgcctgctgtggctgcaactcccctgggaagacagttgagtgttctgacgttggctaaactgcatctttacaacagctggggccccagcgccacctggccctgtgcccaggcaaggccctgctggtcccagcatccttctctcccacagatcttaccccggctcccaccccagcactctggccagcaccgcctccctgtttcatagtcccatcaacccctcacacactggctcccagctgctgccaccaccttgagctgtctcggatagcctcctgcccatacccctttggcctgagggtagatgtaggccaagagcttgcacctacaagcttccccaaaagggaagtgaactcaggaattcctgatgaggattccaggactggctggggaagcacggggttgcaagcgaataagctatttcctttgcgactgataccatccttggagtggatttcctctggtgccttccctgttccacagctgcagaggcatctagcacagggggccaacaccacaggcccctccactcggtacacctgccaggacctcggcgcatcatcagatggtggggcccactcgccctctccccactagagaagtctgggaatgcctgtgtcccagaccccctcggcagcactcaggatggcccaggcaggttgcagaggctcctgcccaccaggcctgtcacacagagctctgggaaatggagatgggcagtcagtgccagccaagggcaggcacccgctaccgatggaggcatgttggtcactgtgtcagcagtgccccatgtccctccagccacaccctgcccagcagacaggcagccccaccaaggtgtccccaagcttccaccacaaagggaggcccagaggggtgagaggcttggccggtactttgtgaaaggtgacagcatgaagctcatctctgtatgaaacctctgcctcggcccctcagtcagggtgctgccctcagagcctggtactcggtggccctggtcaggcctggtggctcagctgcaggctgggtggccgcagggctggcctgtccatggtgaatggagcgcattcatgtctacaaccccgccccacagctctgctctcggcgtgaaaaagctgaattcacggttcggatgaacactcccagcttttctacagtgggctgacttgagcttctcagtctgtaacagaactgaggacttgctctacagatgaggaaactgaggcccagggtgggacagaccggccccggccccacccttcccagcaatgcggctgcatccccatgcctctgtgcctctgccagcccctcctgcaatgccttcccttcccctcagcccccagaggtccagtcaaaacgtcctgctcttgtattacccctcgccccctgcattcctgtggtgtgtcacctgtcagagttgtagctggccagcactatctgcagcagtgccagctgctcacagtcacttgtgcctgggtgtggggactaagctgtccatgtgtatcccacatcagccctcagccccctcacgagggaagtatgcttacatattctgtgtgtgtgtggttatttttttggaggggggacaggttcagaacagctggcagagcaggaggttgggcctgcattggccactccgcagctgccacaccggctccagcattccctcctgcctgtcctcacccaccttgttgagagcaaggctgtctgcttgcctccatccctcacacaagagcacctggagagcctctgcccagggaggtgaggaaagggagagggcagtggggactgccatgaaggcatctcagaagctggcagggctgggggttccaggtcatctgtgtcccagggatgatgctggttccaggaagagctgaaaccttaatgtcacgtgcattttatgtgaggtttgaggcccctagttgggccagctggccttgctctgtgctgtggccacagcaaactgcatggggtcctgtggagtaagggacctagtggagagtgagtggacagggagaccagatgggtcagtacagagccttccccagccatgtggccatatcacactggcatcacccacctattccccaatacaacacagtccgggggcccctcacctggctgaggtatgtgacaaggctctgagctgatggtgtacgttcagcctgagtaggtgtttgcatgtggttgcccccaaaccagtgtgatttggggctgcatggatccagagtagggaggtgacggtcccaccatctctggggtgtgtgcaagggtcagggtttgggaaggggttggacaagaccagtgtccctgaggactgcctacctgctgggagctgacatgggaatctgggagtgcgtctggcctcctggagggggtctcgggttgcccagaggggagcgaggaggaggcccagaacataccccttcctagaacaggaaggtggggtgaccctgcagggtggcctcccacacctcagtgatgcctcggtgacccctaaggcagaagatgcgtgaagcaggcatgaggccctgagcactgctggccacccctgcaaatggaggggccccacctgaagttgggggccggggctcatgtttgagccattttgactgggtctttttcagtttattttctaaacctcagtttatttgaagcacagtacatgattgctcacttcaggaaattctgttcaagttttcctagcagagttactcattccttcatctgtgcaaggggagggtggtggtcataatcaccaccctgatccccctaccccctgggccctgtgtgaagatgacaaggcagtgcggttggctgagggcctgggccaggccaagcacaccaggaaggtgccgcgcatgtgccagatgggccctgaggccgctggggtcccacagcaaacaacaaaacagtcaaacaggtgccagcctctgtcatgtgctcaccacgtgcccaggaccacgtctgtgtgtgcgtttgcctgggtaagccttgcttcgtgaagctgccatgacctccgtctcctcactgaggggcacagggcaacaggctgccaggtgaggggctgaggggccttctgggggccactggcctactcgaggcacagtgagttgtgggaacgaggagtaacttggaggtggagctgcgggtgcagagggaaaaagacacctgggtcatgaagggctggcctgtccgcctgaggggcccagaagtgcagtgaggggatgacgtggctacgcgcctgtgacagggcacctgaggacatttgcagtgcaggagggagagcgcttcagagcaggccagtgtccctcccacccggcccagtccctggtccctgggtagtcactgagctacctcatgcaggaccatggtcttagcaggacacctgtggtggcctgtgaggcagggacaggaaggatgccccactctgggctcctcagggagctgcaactacagtgcaggatgggctgtgatactcagcactgtggatgtctgtcaaggcagggtgtaatggactggaggtcagaacgtgtgaggccctggatgagcctctcacctccccacccccagcccaggcgcttgtcccacacagctgccttggatgtcattagctggaaagccgtgagtgcctgatggggaaggagtggggtgtggggaggtgtttaggctgtgacaaagggatgctaactccaaaaacaggcccccagtccagaggcctcttaaaatgcaaatatgccgcacctgggagggggacaggcccctggctgagatgaggaagcctggaggatgcctctgttccctctcccaccgcaggcccatgagctctcagaccagcaggaggctgatgctggaatatgcgcgcacctgctgggggatctgtgcgcctcagctccaaagtacaggagctagactccagtgtccatgtcaggtcccatccagctgggatgcaggaaaccaaaggcagccctcccatgacccagcactgagggccagacctgttaccaggaacgttggtaactggaagagcctggtacttggggctgttctgtgccccacaaacagagggaccggctgtaaggagactggcctgatggggaatgagaggggctgagccagaggtgccgacacggtatgttttaagtaaggtccaggtggctgcaggcgggatggaaacacatccaccattcatcacatcggccattgcatctccaggctaaggggccacaggagcctcccaaagagccaggctgacctgggccctgtggccagcaaagaagtgttgctggctgaatccccatctgcagcatcgagacctctcccactccgtccggctgagctggccctgcatttgggtagccttccctcagctgcctcatgctgggacagagggaagcaggtcttccgatgagacctcgcaggtgagaggacgtcccagtgccaaggcgaatcacagtgggtgtggcgtggagagggcccactggggtgccagtggtagccacagggcaaggcccagcagcttggggttcttcccgtgtcagcacctttgtgccttctcacaacagtcccagcattgtacagatgaggaaactgaggcccagagaaaggaaatgacttgtccaaggtgcagcatgcaccggcagtgagtaaaccccagaccctgtgttcatggccagggacatctgcccctttgtgtcaccaggagaaccttggtggagaatcaggagtgagaggcctcaccacccccacaactaaccaggcgcaggctcctctccactccctaccttgccccggccgctgacctgggaatgtccttccaggtgccggacctggtctggccagcagtctggcagccacgttcaggggaaataccccagacccgcaggccagcaagctggaagccccttagggatgggctgtcagctcccctgctgtagtgagaaagccacggcctggggcagagtcccttccacaatggcaagtctatttggacctgtctgagcaggagctctcttctcacaaatggccaggaaatgacttccacaccaccccagggactgcatccagctgcctggtggctgaaggcctggttacaaatcacctcaccattccccgacgccaagcagtgagattcccaccattgcacaagcttctcacaggaactgtctgctccgtgttatttatataaataaatgtgcagacaaaccccagcctcctagaaggcgccatcttgctggtaagcaggccctggagagagcaggatgggcactggagccctgggctggcatcacagcagtgaatggtggtgtgtttctgcctccctcttccccgccccgccccaccccccgcggctgccttggcagccatagaggtgaaggcaaggagggcttcttgccagaacaggacactgtggcagttggaaaataccaggctctcaactgcaccctggggagtcagcccctcttgaggccttgggccccatatgtgaagtgaggagccctcccccttgccatggggtcatggttggcagaggcagctcctctgaatccagggtctgtcaggctgatggaggaagtcactgcaggacaagggggtgatgcactaccatggggcagggccacatgactccaaagctgcatccagctctaccccagtggcccacaggtgggctgcagcaggacaatgtttaaccctgccaggccagggagggcaaaaccccatgcaggccaggccaggccaggaaggagaacagagccacatccaccaagggcaggaggacccaggggagcccacaaaggccagatgggtgcaggaggcacagccagtcatgttttgcagggtgagcagagcatggacaggtcagagggctatgaggccaggccctggaggccagcagaaggcatgctggggcttcttgcttcccatatgcatgcttgagtcacagtttccagagctacagcttcaaatagacggctctgttttcagtggtggtgatttgagtgtcaggatgccgctttgcccacctgtctgcactccaggctgcaagagtgcaggcaccgctgtgacacaggctcccgaggtcaccaggcaagcaccagggcccaggctgggcactaggtcagaggacaagactgggcttctggcctggcaacacctttccccactgcctcctctgcagttgatctttcagacccaaatatgaggctcttctctaggtttggcctcctctcatcaacttcagctggtcagggtcctgactttgtaaccgtctgtggttcttcagcctcccgctctgtcttgtcccccatctctgagagctgcaggcctctggtctaggaacaaacccacgatgcagctcctgcctcacttgctggtccatcagcaccacactgccagcaccacactgtcccatgctgggccctctgaccttctttatagccttcctgttctataaagattacaggatgggcacccaccatctcctaagcttcacctcctactagggtggagcccatgtgcagtgaaggctcagcctgcgtcagggacgctgggatggagtgaggcggcaagctcaggtgcttcccacgctctgaagcttcctgtctgagcccggaagtgaggtatgtggttggtgcctcctgcaggctttcctgactcctgccagacagggcccagccaagaaacaagaccaggaaaccaggcgtctacacagagattttgttattatttgaggcccatcatctcctcggtgcccactaaatattagtcagtgtggttcccatggtttgtctcaaggaatagaggaaaccaggaagcctgagcctgaaatgcctgcaaagcaaggggagtcctgggcacaagcaggggcctgagctgagggaagggcccacactcgggagatgtttgtctgtcctgatgaggctgccgcagtggcggaatcctgataagagtgtactgtgaggcaccgtgcccacctccagctgccttgtgagataagtacctgagtttccatgacctctaagtcaggaacaggaggctcaaagaggtgtccagggtccccaaggtccactgagaggcatcagcagggaagcagtttagacaccatggaaggggctcctagtgcattgggacagcttgactcaccccaggactcacgggggccacagtcaggagtgtttcatggcgttggacaagaagagtggctgccttggccttggagagagggggtccacgtggtctatcggcccctcccactgctgccagctgagctctccctacacacaggtgccctgcagaggaccagtctggtttagatctgaggcttcagatgaccagtacacgtgaactgtttccgcatcagtgaggtggccctcctgctcctcctcttacctaaattccactgcctgcccaggaggtgatgggctaagctgggtattaaaaccatctcaactgtcatccccaagtgacccatcagggctcagagaggcagacccaggcctagcacccactctgtgcttgtcccctcacccttgaacccccaggtccataccctgctggtggccagatcacgcccttcccaaccccggaggaagccccctaccccaaaaggaccctgccatccctgcctggctctattcctgcagccccaggactcccacctcaagctccatcacctggcatgagagctgatgtggactcagggcgcgctcagcaagtgtttgctcagtaaattaataatacgtgctaatggtcatatctgttatttaactgatgcaaaatttggggtcagaagcatagcccccaattacagcatcatttctatgagaaatgacagctctgttaccacagtcctctatgatgtggcttccaggaatccattagagctaattactccctcagcagaatgtgacattcctagaccaccacttatctcacatttgggaatgtgcagccaggttcactgcggaggcgctggctcctctctgctctgctggggatgagatcttgtgtgttgcttgtctctgcagaaaggccagcacccccatccccagacctgaggctgctcactcctcaggactcctgttattccgaagctcattctaaagaaagagcaagattggtttggaaaaacagtcttccaggtggagtgcagggttccagggtaatgacgggtacctctgggtatccttcctttctctgcacagatgctgccagagctgttcctcagagaactcaggggctctggagagcagggtttctatgcagcatcctcctgggcacccctgccctcaggcagcctcctttgggcccaccctgtaggagcagcaagccagagcacctggttgtggggcttggagcacatatcctgcctctctgtgcctcagtttcttcatctgtaaaacaggagtgggcagatgtgagaacagactggcagctcgtgtccagctgtggttaccagcgtcattgtcactgcagtcattggtgatgctgttgcttcgtgcctgagtcatcactaccagctgcagttaccacttgcattaccacggtcactggtgatgtagtctagtcagaaaagttcctttttttttttttttttttgagacagagtctcgctgcgtcgcccagactggagtgcagtggcatgatctcggctcactgcaacctccacctcccgggttcaagtgattctcctgccccagcctcccaaggagctgggattacaggtgtctgccaccatgcccagctaattttgttgttgttgttttatttttagtagagatgaagtttcactgtgttggccaggctggtcttgaactcctgaccttgtgatccacctgcctcagcctcctaaagtgctgggattacaggtgtgagccacggcgcctggccagaaaagttcttaaatccaaagcatcagatctaagccagattggttccagatttttgatattttgctcattgagtttatcttagaagcaggggtagcttttgccagcagcaaattccaggtagttactccttttagaagttagaatttattcattttgcagggaagtggtgaactggggagtcagacaagagcatcatgcttcttaaaagcccagacccctggctataacacatcgaagattctcagaagagaattgaggagcggacaggcgccacactccgttgtggtcactgcctcttcctggcccaccacactcctgtcctctgcatgtactgagagctctgtccaggatgccagggtcctgcctcggcagagaggcggtgccagatgccccacagcagctggtgggagtgcccacagctggagggcaggggaggagcctggcctctggctggtgtttccttcccagctctcaagaactggagactttggttacagaagtgaaggctgctccctcacagacttcctagtgtccgatggtaccacatggaaggatcagagttttgaaggactgggccagaacccagatagggcacaaggctgccagcgcctgcattgagggagctatgatgtgacgggggctcctgcagaagatggccttccttgtacaggtgtggggcagcctgtggatgggcagtgggaagatggggggtcctcggagctggaggtgcccagcggtttaggaggctgtgcttggcacatctgtagccccaaagctatatgttgagatcactggcacccagaggagagacccaaaaggggcaagagaacatcttccaagcacttgccactggcaaggagggtgctgccggctatttccgtgggaggtgggtgaagacatttaacctgggcttccccagcagaaggaggtgccattgcagggaccagtcttgggctgagaccctagcaaaggcttcctctggcagggctgcaggtctagggtctgtctctgcctgctgcgggcctgattaacgccagtactttcctttccccagagtcggatggcagagagcttgcgcctctttgactccatctgcaacaacaactggttcatcaacacctcactcatcctcttcctgaacaagaaggacctgctggcagagaagatccgccgcatcccgctcaccatctgctttcccgagtacaagggccagaacacgtacgaggaggccgctgtctacatccagcggcagtttgaagacctgaaccgcaacaaggagaccaaggagatctactcccacttcacctgcgccaccgacaccagtaacatccagtttgtcttcgacgcggtgacagacgtcatcatacagaacaatctcaagtacattggcctttgctgaggagctgggcccggggcccgcctgcctatggtgaaacccacggggtgtcatgccccaacgcgtgctagagaggcccaatccaggggcagaaaacagggggcctaaagaatgtcccccaccccttggcctctgcctccttggccccacatttctgcaaacataaatatttacggatagattgctaggtagatagacacacacacatgcacacacacacatctggagatggcaaaatcctctaaaatgtcgaggtctcttgaagacttgagaagctgtcacaaggtcactacaagcccaacctgccccttcactttgccttcctgagttggccccactccacttgggggtctgcattggattgttagggataggcagcagggctgaggcaaggtaggccaactgcacccctgtcgcctggaggagggccagctcgctgcccgagctctggcctagggaccttgccgctgaccaagagggaggaccagtgcagggtctgtgcaccttccctgctggcctgcacacagctgctcagcaccactttcattctggacctgggaccttaggagccgggtgacagcactaaccagacctccagccactcacagctctttttaaaaaacagcttcaaaatatgcagcaaaaaccaatacaacaaaacgagtggcacgatttatttcaaactaggccagctgggattccagcttttcttctactagtctgatgttttataaatcaaaacctggttttccttctctgacattttttttttgttttgttttttggtttttttttttttttggccaaatctcgtggtgtttcgcagaaaaaaatccagaaaatttcaaatgcagttgagtattcttttttaaatgcagattttcaaaacatattttttttcaggtggtcttttttgtgtctggcttgctgagtgtaaaagttgttatctggacgatctgtctctctgctccaaagaaattttggagtgagtggcagtcctgcgccagcctcgcgggacacgtgttgtacataagcctctgcagtgtcctcttgttaatggtggggttttctgctttgtttttatttaagaaaataaacacgacatatttaaagaaggttctttcacctgggagcaaatgaacaatagctaagtgtcttggtatttaaagagtaaattatttgtggctttgctgagtgaaggaaggggagcaaggggtggtgcccctggtcccagcatgccccgcgcctgagactggctggaaatgctctgactcctgtgaaggcacagccagcgttgtggcctgagggaggccctgctgggaccctgatctgggccttcctgtcccagggcctatgggcaactgcgttgaaaggacgttcgccaagggccgtgtgtaaatacgaactgcgccatggagaggagaggcactgccggagcccttgccagatctccctccctctctccgtgcagtagctgtgtgtccgaggtcagtgtgcggaatcacagccaaggacgtgaagagatgtacgggggaaagagaagctggggattggatgaaagtcaaaggttgtctactttaagaaaataaaataccctgaatggagcccagcattgtcccagtgtgctatgtgtgtagctgacctgtggctggacttggtgccatctggaagggcagccggggacacctccattctgaggtcccatattccaaaccccacccctatacctccacacatttaggtagagtcattttgcaatgaacatcacaaataaacatcacgagaggaaagaaactgcaaagaggggaaacctgccaggtccatgcagtcctggtgtggaggtctgggggtgatgatgactcctgcccctcccgctgcccccaagaccccacccaacactgacccaggctgtgccataccctggacccctcccaccatgtggacacctcagccaatgtcagagtcatcctgcagagtggaagaggtgccctgagggcctggagggttcctgtgcccccagtagtgtagggcaaaccttgtagggttttggagaggaggggtccctgagcatgcagtgctcgctgactggcttgtgtggttagaggtatctggatatagtggaaaagtgccgatcagaagtcaacggagtgcattcaccgagggcctgctgcgaaccaggcacggagccgggctccttactaatgattttatgtaacaccccacctcagcaggttgccagaggtgcccattttacagatgaggaaaggtgcctgaggtcagggagcagtcaagccaggattcaccaggccagggagctgttgctcccactggaggagcagagacgctgatctttcctcctgctggagtccttgcctggcttggcacctgcacaggatggaagcctacagggagcagcacagaaccaccctgcagcctcctcctcaaagcaggacctcaagcaaagtggggggtcggcaggcacacacacgcatgcatgcacacaagcacatgcacacacgcgcagatacgcacgcagccctggtgctgtcaccgccccatccctactcctaagcccacgcagggactcccttcacaccttcctacgtcaccaaacagccagaacccagaggggcttttgtttctgaagaaataacgtgtgacttaaaatcgttgagacttattttgtgcttttaatgccaactgtgaaaagagcagtaatttcgccgtgagcatctttaatctaaaaatacatggctaaagggagaaagggattgagcctcccttcctaatgtgtgcaaagatcagaggaggccttccctggagggaggtttctcccggttcccagaacctagccaggagtctccagttcccccataggctgcagagaaacctcaggcgctgtcgacctctctggccccgtcctcccctgcagttcacctgcactggttctcctcctgagcctgccttgttccgctcttgcccccaatgatccctttgcctagcatgtccttccccatcctcacagctcaaagtcacctgggcagcttcttggaagtctcctccttccctgcattccatctgtcagggctccagggtcgagtgggaaggggtgttggaaactccattgagcagctcaaggccagcgcctctgacccacctcattcctccaaacaatgccccatggagaaggcgcatgctgagctgggatggtccaggagtcttagccaacgggaggtaagcaccaggactcaccaaggttgctggtgagaggaggctagagtaggtggcagggtgcctgaaggggaggacctggggatggctgggccagccctgcccactgcaggtgactaatcccgccttgtcctacttcacgcagccccagcctcctttcccaggacccaccatcatgtggctccctgtgggatattgccatcctcacctatagcccacgtggtcaccctggtggtgcaatgggtcaacaacagtggtcacgataatcccagctctcctcagtgactgctcactggggggcacactcatgggaggccaagatgcttgattccattctacagaagtggaagcagagaccaggagaggcgatgacttatcagcatcacacaatgtgaccccaccaggccaggacctgaggggctttactctgtccacattccccagatccccacagtggcaacaggccctggcaccctacttccaacgtcagccctccagaacaaatggtccatctggctcaggggacagtgccaggaagggctgcactgcaccatgaggacttgaggcaacactgaggctggacctcaccctggatgagctcacctcacccagatgagcctgacgagatggggatgcctgacaggccgggaaccaagaggccagagtgtccctatcagtgaccatcattcctgctaagtccaggaatggggtacaactacccaccaaagactgtcaggctgaggatgtgcctggggttctggtgcaccctgccctgagggcaggcaagacagaaaagggcctgctcctctagggcagctggcctccacccctcaccctgtggcatcaaggggaggaggaggaggaggctgctctgggtccatcgaaggaagctgggtgtccacgggtggctgctgaagagggacagggtgcagtggtggcccacccaaggccactagcctggaatgagacatacggctcactgcagtgggagcacctactttgcttctccagcagcccacgtacctggggttcagatgacattgggtgcattctgggtggtatagctgtagacccccagatttctccctagcttagatgctatgactccagggatgtcccctgaacccccaaatgacttggatcaaactgcatccagacatttcacccgcggcaccctccccttcccaagcccagttctcctttccaaggtcacggagccaatttccagaggcagggcccaggcgcatccttgctgcctccctcctcctctcgggctggtgctctcctccgggctgggagggtcatccatctccacccccgggctgcacacgtgtggagtcagggtcagaacaggccccatcatgctgctgctaaagctgggctggggtctcagagcctggcacaaggagagggagactggaggcagggccagaacagactcacaggtgtgcccagtcaggaccagtgggatggtagagggatacttccgggggaccctgagctgttcaactgcaccccaaaatctggttagagaagaattgtcaatttcagccacagaactctctctcccacaaaaatgaaacctgttttctcatggggttctactccattcctggacttagcaggaatgatggtcaccgatagggacactctggcctcttggttcctggcctgccaggcctccccctctcatcgggctggggagcagaagcagaccctgtgcatcactcagggcccagctggcagggagcctgggctggcagcctgtgtgtgacatctgtctctacaatcctattttctcctctcctgacacggcaccaccacggcgcatgagtagccagcctggaaggaacttagaggaatgcgtgtgggtgagcgcagcagcttgggcccagggcccctgcagggccagggcccacttgggacaatcctcagtcctggggtgccccctcctggttactctgggaaatcatgcaagtcagacttggccagagcaaggattctgaaaccactctcccagacacccatgacacaggggaagaaactgaggcacggtggccagaacaaaacaggggcccaacacatactgtcaaatgaatgaaggaatgagcaagcaggtaagtgaactgtagcaagaagacaaccagcaattgatcctttaaagtatgacataaaacctactaaacagccaatatttgttgagcgctagccacatgccaggcgccctgccaggtgcagagggtgccatggtgaaaacggccttccagtgtggccactgataggaaaccataccaatggccaccagcattcactgggagccagctaagccctgctcagagactgtcccagctaagccacacaggtgacacccacgttcccacaggtgatggtactgcccaaggtcacacgctggtaagaacagagccactgaaatagatgccctcgccaccccccaggccccccacccagaggcccatgaaggacaccacctggggcacagtcacactcgctaatccagaggccacgacactcagtgtacccccagaacagatctcctgggcgtctgccacattgcctccttcccttcctccctctgctcattgtccaactgtcccctgcatacccggtgtcccaggcctcccttctgggcccttcacagatcatgagcagcactcagtaaaccccgcgatgaagggccgaggctccccaccctgaccctcactgaggcttctgttcgtgagcttgtcagtaccacagccccctactcctaatggtgcgcccagtgttggtggatggcagaaaaagacaaggggaggagatggggaaaagcaaactcgtacattttagaagaaaatatggcagaatatcttcatgagtcagggtaaagaaagattatcttacacggcactcaaaaaaaaaaaaggccagagggaaaaaaaatcatgaaattgacttcattattcaaatgaaaaactgctaaggctgggcatggtggctcacgcctgtaatcccagcactttgggaggccgaggcaggaggatcgtgaggtcaggagttcaagaccagcctggtcaacatagtgaaaccccgtctctactacaaatacaaaaattagctgggcatggtggcacacgcctgtagtcccagctactcgggaggctgagtcaggagaatcacttgaacctgggaggtggagtttgcagtgagctgagaccatgccactacagtacagcctgggtgacagagtgagactgcatctcagaaaagaaggaaggaaggaaggaaagaaggagaaagaaagagagaggaagaaagagaaagagacaaagagagaaagagaaagaaaggaaggaaaagaaggaaagaaagaaagggaagggagagaaagaaagagaaagaaaaagaaagaaagaaagaaagaaaggaagaaagaaagaaagaaagaaagaaagaaagaaagaaagaaagaaagaaagaaagaaagaaagaaagaaagaaagaaaaagaaaaagaaggccgggcatggtggctcacgcctgtaatcccagcactttgggaggccgaggcaggcggatcatgaggtcaggagatcgagaccatcctggctaacacggtgaaaccccgtttctactaaaaatacaaaaaatcagccgggcatggtggcgggtgcctgtagtcccagctactcgggaggctgaggcaggagaatggcatgaacccgggaggtggaggttgcagtgagctgagactgcaccagtgcactccagcctgggcgacagagtgagactctgtctcaaaaaaaaaagaaaaagaaaagagaaagaaagaaggaaagaaaaagaaagaaagaaagaaagaaagaaagaaagaaagagaaagaaggaaagaaggaaagaaagactgctgcaccagtgaatcaacaaaggcacagtgagaagccaagaaaacagcctggtttgaaatgatatttgcaatgtaggtaaccgacaaagggctggaatccaggataaattacacactccttcaaatcaataagaaatggaaaaacaactcggcaacagaatgaacacactctctccagaggcactgggcaggagaggaatctgatgaggtgtcaggcagagggaagatgtttcctctcaccaggacagggacagtaaagccatatcacagtgaaacaccatagcacatccatcaggctgggatatgccccgggctctctggaggccagaggctgggctggaagcagttgcaatatccagcaaagctgaaggcaaacacattctccctggcccagcgatgccctccctggcagatgctctaggggactctccttccagggtaccaggaagccctgggcaggaacagccatggcacagtccttttgcagtacaggagtacaaacaaccaacaagcctgccagcctgggatgggtgagtgtatcatgatacattcaaacaccggaacagtgtgcagtgatggaaatgaatgaaatacagccagtggcgcaacatggattcatctcaaaatttctataaatctctaatgttatttaggttttttaaggttttggaagtaacagagggatacatacagcaagatccacttacatagttttaaaacatgcaaaacaagattatatatcgtccatatgtaattatatctgtggtaaaatataaagatatgcattttggggacatagtcaccagattattagtagctcaaggaaaggcaggaggaagagtgctctgggtggggggaggttcacagggtgcttggactgtacctatgatttcttcaaataaaaatttcaagcaagtataaaatatggatatagaatgtaaagatttggcaaagctggctggtggtatccaatgttccttatcaccatctctgtacttctctgaatgctttaaataggtcacaatcattgtaagaggactggttgagagcagcaagtcccctgtctccacactccaagaatgaggggactagaccctcgcttattcctcaggttcctgcatggtgagcacagggcattaatttagctcaacccagcactggtcccccatggatcaccctaataccccaggggctctcaaccctggggcatgcatgactgtcattcaaggtgcattttcagaaatatgtgtgcagggccccacccccagagactgctcctggtggcctgggagaggaccaggggcacggtggtgtttttaaaaaaccacaggcctagtgtgctcaactcccaggccagatcagctggaagaagatgtgcttcaggagccaagcaacaatcctagaccctcacaggctctgctctgttgggcctgcctatctgcacctgatcccgtagtcatttctctctgagccttaacccagggaatgctcacgcctggccttgaatgtttgcactccatccttgggcaggacgctgagctatacaccaggccagtgtttccacttcaacctcatttctggcctctgaggcaggtactttagacatgggaaataacctgtccagggcacacggggagtgaggggaagggcagagggaacccaggttcatctgactcctgggctacaatatctgtttgtccaccttgagctaaggtatccgcttcaaggcctcctatcatggcccttgaaataattccctcgtctaaaaatactcattgcatcatgcgaccaggcaggtatcaatctgccataaatcttaactctcgagccgtggtatcgggtagctgttaccctggactccccatctagtcagcagggccagtgggacaggaactgtatgcaacattgcctctgggacgggccttctttatcccttaaatgtgtgctatggtatttcacaaaagaaaacatttacaggacatccccttttaatcatcagggaaatataaattaaaaccaaaatgagatactactacacacccaccaaaatagctaaaataaaaagacagaaaaaaatctatgattaatgaggatataaatcacctggaactctcatatactgctagtggaagtataaattggtacaagtattttattcattttttttagagacaggatcttgctatgttgctcaggctggagtgcagtggttattcataggtacagtcccattactgatcggcacaggagttttgacctgctttgtttctgatctgggctggttcacccctccttaggcaatctggtggtccccccatctcgggaggtcgccatattgatgccaaacagtgcggacacccgactggcgtagggcactacagcctagaactcctaggctcaagcaatacacctgctttagcctcttgggtagctgggacatggcatgtgcagatgcaagtattttagaaaaccattgggtagtaccttctaaaagctgaacataatcttacccaggccagccattctcttcttaggtatgtttcaaaataaatgcatatacatgtccatcaaaagacatttataagggtgttcatagccactctattcttggtagccataagctagaaacaattcagatgtccgtcagcaacggaatgggtaagtaaactgttgtatactcacatagtgtaaataccatactccagcataaacaagcaaaaatcagtaatacatcccacacgtaaatctcagaaataaaacgttaagcaaaagtagctacaagcaagatattacaagctggatgtttccatttatgtaaagttttaaaaggggcatcatctatggtcttataaattgaagataccatttatcattggtaagggtaatacccagtatgggcatgtgggaagtttctggagaggtggtaaatactctctacatgtcttgattggggtggcagttacaccacatgttcactgaaaacaacttgaccaaatgttcgtttaggatatgcgcttttcttttttctttctttttttttgtcttaagacagagtctcgcactgtcgcccgggctagagtgcagtggtgcaatcttggctcactgcaacctccgcctcccaggttcaagcgattcttctgcctcagcctcccaagtagctgggattacaggtgcccaccaccatgcccagctaatttttgtatttttagtagagacagggtttcaccatattggccaggctggtgtcgaactcctgacttcgtgatctgcctgcctcggcctcccaaagtgctgggattacaggtgtgagccaccacacccagcggatatgtgcttttctaatatgtatgttgtaatttaataaaaagtggacgatctacaccctggtacatatgtgacctggagaggagaccgacggacaacttgagtgcccgacagatctgtgtgcaggacgcaagcctacctctaggcacctggaccagctgcatgtatgccttgtacaggttcccccggcagactgggctggggtcattcagcaggaaggacagggcaaggacgatgtcgtgctctagaaaggcgtatctagggaagggagggtggacagtgacataagtgagaccatgccctgagaggctcaaattagaagagtcagggtccctgctggagtctgatccatgctatctggggtagaccacattcctctggctttgtgggagcagacaaaggctacaggtgcgtgatccatctcacctgaacctccaggggagcgagctcagcaggcccagcccaccttggccccttgttcttctggtctcccttgcctccacatctatgtacaccagttatgcttgttgttatcattatataagttcagtaaatattaggcaagccaattagatgagaagaggattttctttttcaaatttgtttatgagaaaaagttgaatgctttggaaggactcaaaattgagccccaactcccaaccaaaaaaaaaaaaaaaaaaaaaaaaggagatgattggctgggcgcagtggctcacacttgtaatcccagcaccttaggagacctaggcggatagatgacttgaggtcaggagttcgagaccagcctggccaacatggcaaaaccccgtctctactaaaaatacaaaaaatcaaccaagcttggtggcacatgcctgtaatcccagctactcagaaggctgaggcacaagatcacttgagcccaggaagcagaggttgcagtgacctgcaactgcaccactgccctccagcctgggtgacagaatgagactgtctcaaaaaagacaaaaaaaagagatgattgtaaaagattctagatagctcacacctaatcccagtgctttgggagactaaggtggtagaatcacttgggccaggagttcaagaccagcctgggcaacatggtgagacccagtccctactaaaatgttaaaagttagccaggcatggtggtgtgtgcctgtgttcccacctactcagtaggctaaggtgggaggatcgtttgagcctaggagtttaaggctacagtgagctaggatcatgccactaaactccagcatggatgacagagctagaccttgtctcttaaaaaataaaaagattctaggccaggcgcggtggctcacgcctgtaatcccagcactttggaaggccaaggtgggcggatcactaggtcaggagatcgagaccatcctggctaacacagtgaaaccccgcctgtactaaaaatacaaaaaaaaaaaaaaaaaaaaaaaaattagctgggtgtggtggcgggcgcctgtagtcccagctactttggaggctgaggcaggagaatggtgtgaacccgggaggtggagcttgcagtgagccaagaacgcacaactgcgctccagcctgggtgacagagcgagactctgtctcaaataagtaaataaataaataaatataaattaataaataaaaagattctagaagggttttgcatacaggttatttcattaatgtctttgagttcttgctctactttaaaaaaaccaaagctgcaaatcagacgatgttatgagtatggtttaagcaaaaaaaatatgataggaaacaccaaccagtggtctcatatccgacaaaaagcctgggtcccacatggggattgatgaatgccttatcatttgtgttttgggttaaaatgaaccatttaaaggaaaccatttcttcagttccttgctttgtaatcatttcttttgattaaccaactgactgctgggcctgaatgcatctgaaagaggccttctgaggtcacgtctctgagggctgggttcaggaatgaatgagaatgcatgtgcaaacccctcagccaagtgcccacaggaagtgcccaaccagctgtgccactgcggcatttattataaataaaaataaattttatttattttatttatttatttattttcacttatggtgtgttttgaatcgtctggaaaaagaaagtcaccgttggacacacaagttgcaggggtcttccctgaccacgggggcttccttggtccgtgtctagtcacccactccatgtctctcatgctttgatagtcagttgtgtttgcctgtgtgcctcctcaccagaggcaagcaagagggcagggaacaggctgccaggaagctctcttgtccgtgggatgtcatgcaaattaactcctcaaggtgacaagatgccaagcccagggctgctatcctcattcccccttcctgtcactacttctgtgggtagaagaggcagaagagtttcaacctgggcagttcagggcagctacttagagcttgatgggctctgaaagctattgacattggttataagatcaccactgacctcaagggaaatttagaagttggccacatttctgagaacgctgaaggagtgcacgggccaggccattatcaggtccctggtcagggatggtcacttcaccatgtcttcctgccttgctaatgtgggcacagccaggacccctggcttaggcactctaggtgctgctaaacaaatccttactaccattcattataagtaggttgatgcaaaagtaattgcggtttttaccactacttttaattgcaaaactgcaattacttttgcactaacctgataattgctcaggcttcagggacctgtcctctcagcatctgtcccccctaactggggattactacctaatgtccacatcaggtccagaaaagtagggaggaaaaaccagcaagaaaggtgacttgactcctgtgtgcccctaaccttttaaagcaccttgcctgggtcatctaagatctgcagagtgaggctgggattaggattgttgcccagatcacagagcaggaaagagtgggccccccaaaaggctggggcttgtgtccctacttcactggtctgtctgcagtgccagcctgcccttcttggtacaaagcatgtgaattagggtgctagccatggcaccacctccacacacacatgcacggttcacacagggccggggctgcacacaggatcagccaccaaggcagcgagagcttggggactagcagggctgagtgactttgggttttatgagatgccctgcagcctctgcctctctgggttcaagcaattcttgtgcctcagcctcctgagtagctgggactacaggcatgtgtcatcatgctcagctaatttttgtatttttagtagagactggtttcaccatgttggcctgtgtgcctcctcaccagaggcaagcaagagggcagggaacaggctgccaggaagctctcttgtccgtggggtgtcatgcaaattaactcctcaaggtgacaagatgccaagcccagggctgctatcctcattcccccttcctgtcactacttctgtgggtagaagaggcagaagagtttcaacctgggcagttcagggcagctacttagagcttgatgggctctaagtaaaggttaggggcacacaggagtcaagtcacctttcctgctgttttttttcccttcaaatcctgaaccgatttgaagcctctctgaatggctgcctgtttacaccaaacaacccccaaggcagtcagcaccttgcctttcttgtcttttcttccttctgggcctgtgcacactgggcagtggccccctttatccgaaagacctgggccagggcttgggggtgtttgtgatgtggggttctgtttttttggggggtggggacgggggctggtggggagaggttccagtgaaaactggaaaacctgctagaaaaattctaaaagagctgtaacactggggttttgtttctaatacaaagtaaaactactgatcgccagtcaagagggtgaacccagctgatgtgggaaagcacctccaaccaccctcaccctgttgccccaacacctaactaaaatactctataaaattttttttaagtgtaaaaagtgaagctgtgcttacacaggaaaaggacacttccaggtgccagaaaccaagaactcagccatcatgaacaggaagtgaggccaccagaccagatactcactttgaggatgttattttaacaccctcacagggacaggagccaaagccacagcccctgtggggatctgggttggggaactgggctctctgtaaaaagctaagaagtggcaaaattgttgcagaagtaagatctgaactttcttcccaccttgaaagtgggaagctcagctaggtgcagtggctcatgcctgtaatcccagcattttaggaggccgaggcaggcagatcacttgaggccaggaatttgaaaccaggctggccaacgtggtgaaaccagtctctactaaaaatacaaaaattagctgagcgtgatgacacatgcctgtagtcccagctactcaggaggctgaggcacaagaattgcttgaacccaaagaggcaggggctgcagtgagctgagatcgtgtcaccgtactccagcctgggtgacagagtgagagactgtctcaaaaaagaaagaaaagaaagagagagagagagagcgctcagagcttggaactaacataaaataaataaaaatcagtctggaacagagggccccataagatccacacagaggcaaccaaaaccaccccacaaagagtcctgctctggctaaatagaagcccctgcaaaaactgatgcggcagacaacactccagagcactctaagcagctcaagtgcatccacccaggggagaagtgcggctcgcaagcgtcacactggtttccagaacagcatcccacctgcccacgctatggcttgccgtgatgtggagcacctcggtggtctttatgcgcaccatactgttgctatccttcagcaaagctttcaggttctccatacagcctagaaaaaaaaaaaaaaacaaacaaaccaacccttgaatttttgccagtctcagaaaccaaccaacccagaagtcaataagtgggccagttggggcaggaatgtaccagagtttctgctgctttggggcactggggaatcatgttggttatgcagcatttcagagtcactgaagaggctcatgtctcatccaaccctccttgtgattctccctgcacacttcctaccagtgacttctcacaaagtctgtcatgaggttaagaaaatggcctttgccatttctttgacctcaggagagatatggggtcaaattataaccctgtgtcaaactagtcatatgactttgagtgggttacacctacggatgccagatttagcaaataaaaatccagctttggccaggtatggtggcttacgcctgtaatcccagcactttgggaggccaaggcaagcggatcacctgagatcaggagttcaagaccagcctggccaacatggtgaaaccccatctctacaaaaatacaaaatattagccaggcatgatggcaggtgcctgtagtcccagctactcaggaggctgaggcaggagaatcacttgaacccaagaggcggaggtttcagtgagccaagatcgtgccattgcacttcagcctgggcaagagagcgagatgccatctcaaaaaataaataaataaataaataaatacaaatctagctttatttatttattgggcaaccctagacttacaatccttctctgaaccatgcttttcttatctgtgggttgagaatggactctcccctgtaggtggcctttctaaggattaagataatccaggctgggtgtgatggctcacacatataatcccaaaactttggaggctgacctgggagaatcaattgaggccaagagttcaagaacagcctgggcaacacagcaagatcttgtttataaaaaaataataataagaaattagtcagccatggtggtacttgtagtcctagttactcaggaagctgaagcaggaggatctcttgaccccaagatttcaaggttacagtgagctatgattctgccactgcactctagtctgggagatggcaagaccctccctcaataaataaacattttttaaaaagaacccgggcaccgcacctatagtggaactggcctggagtcaggctcaaacaatagcaacccttattactgaagttctacccagtgcctgaagccatgctaggaccccagtcatggtcacctgtgctgtgtcacgctcacctatgttcatggccttgtagatacactcggggtcatgcatgaggtcacacaaggccatgagggctttctgcctcgtctggaggtcctctgactgcagctcctccttcagcttgggcagggcccgatggccataggcagtggtaatctgggtggcattgatgttaatgggaagctccaaggagttctgggaatgggccatctttccccaactacagaggcctttccaaatgaagctctgcagaaaccactcactaaaagagaccaaaaagctgtcattatttctattatgatttaaaagctacttctcatctgatcctccaaactgtgagggcaggcaaatgggtatttttactttcattttacagatgagcaaactgaggctgagagcaatgaagagatttgctcaaagtcccagtgaaggtaagtaagtagcagcccaaactgcaaactccagagccctcccacacaatagtgcttcacagaagaaaccactgatactttcatctggatcttcagtcaaaggcattaaaggacaaaacaaaccaaacaagcaaactccaagttggtcactctgtttagtgcttaccttgtgccagcaataagtagtatccaattcaactaccccataaggagggggctggtattatccacattttacaaatgaggaaactgaggttctggccaaggagcttactggaggccatgaaactggtaagactagaagccagtgttcaaatctgggtctagctcattcactgccaggaacccatattcagatgcttctgacacatccatgaaaaggaattaatgttaaaaggtgatttatggccacgcgcagtggctcacgcctgtaatcccagcactttgggaggcccgaggcaggcggatcacaaggtcaagagatcgagaccatcctggccaacatggtgaaaccccgtctctactaaaaatacaaaaattagctgggcgtgatggcgcatgcctgtagtcccagctactcgggaggctgaggcaggagaatcgcttgaatcagggaggcggaggttccagtaagccaagatcgcgccactgcactccagcctggcgacaaagcaagactccgtctcaaaaaaaaaaaaaaaaaaaaaagtgattaacttttattgccgacacacacacacactttcagcaactatgggcagtgtaggttagtagttaagaactggctccagattcaggcctgggtgaccttggcaagttacttcctctatctgtgtctttctgcagcttcaaaggggagatgataacagtacctccttccctgcctcccagagttgtcatattaacgaatacacgtaagcctggcataccagggcttcagctatgttggctgtggttattattacggttattatcatggttagtagaatggacaggccacaggcctgtaggaatctactccagtaaaaggtaagccagatgctcacgcgggacaccagatgacaacggtagaagtgggggccggactgggagggacgtggccatgtttgagttgagctcccctcacaggaacggtgggtgctggagacaggggcctgccttcttctaagcggcgtgggctgggagagtccggccggagacaaaagaccgtgattttgagtgtggggacacggccccgtgtgaatgggactgggtgggtcactgggcccccctgtccccgggcccctagcccaccaccgccgcctcacctgcctccgcagccctttctgcttccagtagcccgcgccactggccaacctattcagttgccaggcgacatcgttgccaggcgactccagcagcgtccgcggcgccgcggtcgacataatcagcacccactgcgcaggcgcaaacagcccaaggctgcggccggctgcaaagcgggaacaatcatttacagggttgctgtggagaccaaaggcagctcagctttgttcaaagtacagaagggaaaggaagtgacttatttacgcccttctctgtactgggtactttgcatgcctctgatcctcagagtaaattcataaggtggtaacatctagtttagagacaagaacctcagagaagttcagtcgtttctcccaatttttttttttgacggagtttcgctctttcacgcaggctggagtgcagtggcgcgatcttgactcactgcaacctccgctccactccgcgccaccgcacccaacccgggtgcaagtgattctcctgcctaagcctcccaagtagctgggattataggcggccgccatcacacccagctaatttttgtatttttagtagagacagggtttcgccatgttggccaggctggtctcgaactcctgacctcagatgatccacccgcctcggcctcccaaaatgctaggattacaggcgtgagccactgcgctcagccagtttcccccaaattacataggcctgatctcaagactgcctagccctgcccatgccccttgctcttcaggctgaccgcctggtaatgacaaaggttagcctctgcagtggacccaacacactgctggccagcgtagctgttctcaaaagcaagccagacccagccaccacctgcataaaaccctccatggctccccactagtctcagggctgagtccaaactcctagcctagtgctccagtccctgggtgatggcctcctccagccatgccagactctctcttaacccctcaaatgccacctcgctcatgaagcctgagcgctctgtaacactaattattacctctttatccttcaggatgcaacttggtgaacacttcttccatgaaaccttccttctccctgaaggagtgaagtatgggccatcccaaaatatgctggattggtatattgaccattttgagtggacaacattggaaaaatagtggcctcagaaagggctaactgggccaggtgcagtggctcatacctgtaatcctagcactttgggaggctgaagggggagggttgcttgagcccaagagtttgaggttacagtgagatatgatcacactactacaccccagcctgggtgacagagtgagacctcaactctaaaataaataaataaataaataaataaataaataaataaatagatataattttaaaaaaagatacaagaaaaggcaaacagatatgcttctttctgcattcagcaagccataaagattcctctaggagcggtaccctcactgtaccagggcaagaaaatagcccttgtcacctgagactaagaattggggactgcaatggacctgaataaatatacttaaccctgtcttccactaagtttatgcccctcatattatctcctagtgaatcccctagaatttactgccctagccagatcccctttgtcctgccatttcttctcaaatttgtcatcctttgtctaaaaagtataaaagcatcttgctttggccacttctctagacttcactctggtaaagatccccatgcgcatgtaaaactaataacacttgtatgcttttctcttgctaatctgcccagtgtcagtttggtttctagatctaggcaaagagcccacttaagagctaaaggaggattggggccaggtgtgctggcttacgcctgtaatcccaacactttgggaagccaaggccggcggatcacatgaggccaggagttcaaaaccagcctggcacacatggcaaaaccccatctctactaaaaaaatttaaaaattagccaagcatggttggtgcgcacctgtggtcccagctactcgggaggctgaggcaggagaatcgcttgagccgggaggcggagattgcagtgagccgagatcacactactgcactccagcctgggcgacagagtgagactccatctcaaaaaaaaaaaaaaaaaaaaaaaaaaaacagctaaaggaggagttcagggtgatctctagctcctgccaaatccccaaatccaaattagtaagtgaccccacagcttaatcttcccttctcctaaatcccattggcacactcccttcccctaattctctatttacttctctgcttcccgcagtggactccaatttccctgagggtggacaccatgtccgttctctttccttgtctccccagtgctaggcatataccaggaagctttcagtacatgtaggacaaatgaatagttaatggacttgaatcaagctttacagtataaaagcactttcaccatctcaggtgatccattgaaatagatagttgcgtttattttatagttgagtaaactgaggtgcggaaggtggaacaactcacctaagttcaccccctaagcctcaaccttagcagtgaaactcactaaaagacattaaacagagccaggtgtggtggcccttgcctgtagtcccaaggactggggaggctgaggcgggaggattccttgagcctaggagttcgagtccagcctggacaacatagcaagactccatctctttaaaaaaaaaaaaaaaagacatcaaacaccagcctccagcacacttagctttgaattgaagatgactgagttagatctgtgtaccaaggcttccatattgtgatgcagaaaagttaaggagctgaattaagtaggttctcaaactgaaccccggacttcgaagctggttccacggttttataagggccacaagaggccatctagcccaaaacagctaactttccaaaccgaaactagttcagaggaaatcactgactcaggtcagctttttattaaggaaattaattttgtaccgtgagctctagaagccaggcatatgatattcagacagcactggattcagaactatgcagactaaggtcagtagatggtaggcaggtctatcttctgcagctgcagggtgcttgactccaattaaacatcaataccacatcaggagctcttatgccataaccgcccaacctctcccagccgagctgatcaccagaacctgcgcgaatctctccacggtcagccccacccagggctcaggctccgcccccgggcctccatagccccgcccaccgcccacccatccagcaccgcccttgttgtcatggtgatctccggctctccagggtgtccaggagtctctctgctgccagccccgcccagactccaggcaggttctcgttgctatggtgatcgccggtgcaagctggatgcttggacgcgccgctgccagtccaacgcagaccccgcccacgacgtcgacgattcgtgtagcccgcaggtcccgcgtggctctcgttgccatggtgatcgccgccgctggctcaggcggaccaggccgcgcggagccccagctttcacagccatcgctggtgagtcagctcgcccactctgtccgaccctcccggtcacccaaccccgtgctggcacatcccgaggccagggccgcgagggcacagcgtccgcgcccacttcccgcccctataacttgaaagcggcctgcggccccggggcgtcctcatttccggagcgcaaactctgggccaggcccgcgctggttgtggaggagagccaggtcagatgcgggaagacaaccggactccgccaggaccaccccagcccagcctggagaggagtccggacagaaaaaggagacagaggggctgttgaggaggctcgaggagtcagaggcctggtgaagtgagggttttcagggaaaaggcctagttggctgaaagttaaggcccccaggcccacctagagccttcgtcctttgcagactgggagcaggagacccctccccactctacttccactgcctgagctgtgccatgcctcacagcccagtaaggtaagctcagaggggagctcctccttggtagacacctgtcaaggggagacccaggtcttctgactcccaggcagggtggggcaggcctggttcccccataccatgctgcctgctgtatgcagattgagagaaatggcctctgccccatattcctgacagagagggaagcctggatctggttttatttataattcttgagacaaggtcttactctatcacccaggctggagtgcagtggcaccttcacggttcactgcacccttgacctcccaggctcaagcattcctcccaccttcctcccaagtagctgggactgcaggcacaggccaccatgccctgctaatttttttggtttttttttgtagagactgaggtttcactttgttgcccaggctggtctcaacctcctgggcccaagtgatcctcccaccttggcctcccaaagtgctgggattacaggcatgagccactgcacccagcctggatctgatgaaaagttaggtggaaactcatgggtgaatccccaggtatttgcacagctccttaactgtctttctcctggttgggtccacaggactgtggaagaatgaggtcctccctgacacctttggggccccctgtgagccgcgaccgtgtcatcgccagcttccctaaggtagagagtcattacgtctgcagtgctctcctggccctgcagccacatcagctctccccactctacactcatgcctagaagtaaagcaggtgaatcaaggaggtctgtccattgtcagatttaccttgaggagctgggagactggtcactgactgcccaaggtgggaccgcaagttaatggtgacactgggcagcagtgtggcctggaggttataagggctgggattttgcagccagacagtccttgatgtgaatccttcattctgattctgtcattaagctgtgtggctgtgggcaaattactcaacctctcagagccactgttacatgaaggtaattcctctcatattgggtgcctggctcatggtatgcaggagctcccctgcagtcatagttgctgttgttctcatcatcgttgttgttatcaaaacagcattccagttccatgaccccaaatccagggctctctcctcttgccattccgcctctatgagcttgaaaactcacagctctcttgtgtctgtattaaaatccaatattaattgcagcagggaatacaaattgagtacaacctccatagggggcagtggacaatatttaccaatatagaagatgaccctgccctctaagatccagccattctgtttcttttttcttttttttttagagacaggatcttgctctgtcacccaggctggagtgcaatggtgccatcataattcactcctctaactcctgggctgaagcaatccttctgcctcagcctcccggagtagctaggaccacaggcatgtgctaccatgcctggctaatttttaattttttttaatagagatgaagtcttgctatgttgcccaggctggtcttgaacccctggcctcaagcaatcctcccacccgggcctctcaaagcactgggattataggtgtggaccaccacaactggccttgctattctatttctaggaatttacttggcagatattctggcatgggtttacaatgtgcataaggataggggttggagcagtttgtaagaatagaagataagatacaacgtaaacatcctcggagaggggactggttaaacaagtaatgcttcctggcacagacatgaggaagaatgaggcaacctcttcaggagctgacatgcaacgagagccaaagtaaaccgttaagtaaaaatgcagggcatggaacagagtgcagtagagtgtgtgcagcacactccggtgtgtgaaaacaaggagagggagaaatgtctatttgtttatatatgcagaaaatatttctggcaggatatataagcccctactctcagtggttgcctctgtggcttcggacaggtgcagagggatagatcctctccatggaatggccttttttgcatcttggattctgtggccaggctggtgaggaggaggtgactctagacaggtcctgggtatttggagtatgtggctcttcctccttcccccttctttaccttcctccctaagttccttcttcacacacctacagagaaaggctttgtgtctcagacctgtggacagttccccatgggttttccatctcaacagaggctcaggcaattattctctctgcagagcttgacagtggtaactagggatgacagagactggtctttcttgagtcaaaaggaaggaaagtgtgattggcacaaaacagtccaggtatcatgagatgaagaacctcattggcagagcagacggcgaggatcagagttaaggagggttgcctgacatcacacagctgctcctggtacctctgggatttgacctggccgtgtctggctccagagcaccctaccccagggaagcagcttagggaatccatcctggtttcacaggtggcattctcccctcctgcccataatagtcagggatcaaggccactgctggtcaagttcatcctgcaccccagggccctgagaaattcagtcaggttgagcagggtcttcagactgcttgccaggcaagtccttccctttatgccatgtgcctcagtttccctgtctctgaaatcagctcacacttcttaccctgcagccttcattatcacagtcttccagccatcctgtaatgaccattgtgtctgagccagtccctagcttaaagctgtcatggaagctgacagaaagaagcagccagcttgttcatggtagctgctgctcttctgcaggaaagtagactatcaggctaagctgctcacctgcattattcagttactcctccaacgaccacatgaaaaggtgctattatgagcatccctgtttaatatttaaggaaactggagctcgataagtttctgtaacttgccctttgccagtctcctttcaccatccctgctgcctcaatcacagctggaactgagagggcagatgggccaggcagagcccgaatccatggttgagacactgcggctgagggaggggagctgtggatccaagcagtgttcagagggacagagcaggtggctgtggctgtgcaggggtggggggcggggggcgggacccttgccatacacagatcacaccaacagcctcaatggtgtccttctccccacatccttgccacattctgtatttagcctgggccaatccaatggcaaaaaataatggtcatctttagtttgtttaatctcatttttttctaattacagaccaggtgagggtgggtggggtacgtgcagttttttctgaccctgaggcccatgctcttaaaccactgctcaggtctgccttccaagaaacgtggacagcagaaagcgcctcctaggacattttccaggcacatgtatgcatgtttttaaaacaaaatgtcatcagagattcatagaaggtatggattagagacagggtctcactctgtcacccaagttggagtgcagtggcatgatcatagctcactgcagcctctgtctcttgagctgaagcaatccttccacctcagcctcctcagtatctaggaccacaggcatgtactactgcacctggctaattggatcttggaggatcttggcaccaaaagagctccactcgtctcgccctgagagggttgagacccagagcagacaggcctgtcacatgcatgcagcaagggaactgcggccccaggtgagacacagatctccaagtccctgcctgggctcgcccctctggactcacaaggccccagagcctcaaggctgaggaaatagaagatacacatgacaaatgggtcagggaaagctaatgaggctgccagctgtgaggcctaggaaggaaggctgggaagatcatctcccctcactgcttggctacgagggcggagccacagctttgcaggatgatgtgtccgtctgtctgtctctttgcagtggtacacgccggaagcctgtttgcagctcagggagcacttccacgggcaggtcagcgctgcctgccaacgcaggaacacggggactgtcgggtgagcctgcagggtgtgggatgggggagcaggtggcaagaaggaatgagtgcatgaagcacgtgaaagaatgaacaaatgaaacacacacacgaggctggtgcagccctgtacaggcctgaagatgactggggttttcttttttttttctttttttttttttttgagacagagtctcgctctgtcgcccaggctggagtgcagtggtgcgatctcagctcactgcaagctctgcctcccgggttcatgccattctcctgcctcagcctcccgagtagcggggactacaggcgcccgccaccacgcccggctaattttttgtatttttagtagagacggggtttcaccatgttagccaggatggtctcgatctcctgacctcgtgatcagcctgcctcggcctcccaaagtgctgggattacaggtgtgagccaccgtgcccagccagatgactggggttttcatctggcttcagttaacacacctgccatatggaacaactttccctcttctaagtcacgcaggtgatttttcagcctcaggtcttggtacaagttcatttcctctgtctggaatgtctttcctaatcccctcgcttccccttccccttccccttcaggtctcagcgtgtcaagtcctctgggagccttctctgaccccccactacccttgcccctggactggggagggtacccctcctgggtgctcttgtgcccccaagaacttatctcacagaattgcaggctggattcctcactagacctagcccaagagggcgagggctgtgtctgtcctcttcctgccgcggcagctcctgccaccactggcagagggattgtgaaatagtcattccttcttttaacaaataggtacaagggcctgcttttgcccctcttcctaaggagctcatagtctgctcagggagttggctgagctcacaggggtcacagaggtgcgatgaggctgccagagagcgcagctagaggttcccaaactgcacagagtgggtgaggcagagctgagatcagaatagccgaagtggccatggtggtgggatgagagtaatggcatctgttggggaatgctggtgccatatcaggtgcttcacacagatgatctccctgatcccttatggcagcactggaggtggggaaactgaggatcagagggtacctgctgtaagaccttgtcaacacctttactcattcataggagaaatggagtcagaacgaaagggccctctgggagcagggtagacacaatccctgctctcacggacctggcaaggtgacctgcagcccaggtcaccaggtgacacagtggtgccctcttgctgtctgcaggcagaggaagtgcctgtcagatatttacccaggttggttgctgtgaccatttggctccttggggatgagctgcaaaaactcttaaagtgttgtcaacagtcccaggaagctgggacaatggcacctgtagtcccagttactcaggaggctgaggtgggaggatcactcgagccaaggagtttgagactactagcctgggcaacacagcgagaccctgtctctaaaaaaataataaacagtccgagaaacgcctctgcacagagtgtaggacacacagagggtgagggtggcggctgctcttggggaacagtgacccacagagagcccaagaacctcagagccgatttgcctcaagccacagcccggatgcatagagcctcagccctgttcggggtgtgccccttggcctgtcggacccttacagatctctaagtgagcagggcacggtggtgtcatggtcagggagtgcctgcttgcaagaggccggagcccacatcggcgcacagccccgggggtgcataggagggtgaggggctgcccgtcccttttgccggggtctccctgcacgtggaccctgtgtctgcaccctcagcacagctcccggacagcacagacgtgcccacggctgttggttggttaccacagccacaccctggcctcctgcctctgcccctccacctgtgactcggcctcttgttatgcccattcctaattctcaggatggggactttggccaaatatggtgaggggtgcagctctaggggcagcagagtctccagcctctcccgtctcccctctggggactgtgaagggggaacacagtgtctcagcagggtggcccatcctgtgtccaggagtgaggggtgtctcaccagcagagagctcagggaaggaaggggctgtgagtgtctgaagacaccctggaaggcatgcccgacggcaacacggccatatttctcacaggctcaaactctccaaggtggtggtggttggcgatctctacgtggggaagaccagcctcatccacaggtacaaggcttcctctgcccctttggccacctcccccagcaccaggttgtcatacctttgcctgggtggcccagataatatcaacatagcagaaatcatgtggcttccaggaactgctgtgcctcagcctgctgggagccggataagagggggtgcaagaaatcggggagatggcagggctgggcagaaattgtggcgtcccaggagcctggcgcttgtcagactgtccccctggggccacgggctctcccctccactgccctccctgcaaatggctgctcagtttcgctcagtttctaactcacagcttgccttccgagctcctgcagcctccctttccccacattgtccttgctggctgccctgcccacccatggcctgcgtggaccatcgcttcctgatgggaagtggaccttatttgcctaaagacttgcagtgttacaagtgaagcttccgggcacatttctgtgagtacacccctgtgacgacttcctcatcccccacaggttttgcaagaatgtttttgatcgagactacaaggccaccattggggtggactttgaaattgagcgctttgagattgctgggattccctatagcctccagatgtaagttgctggttcccccatggctcgtgggcagcttcctacaggcacctgagaaaggatttggggagctccttcactgtgtccatgtcaaggaggactagtctagacaagcagagcctgggggtgttgtgtgacacttagcttcctggctcccagagcccccacatgctctgtcagtcccaaagttgtctcattttggtcattggctctggggaaggtgctcacagcctgacctgcccacctgcccatgacctccccaatgcccaccccactcctcttgaggccctggctccagtccctccctgacctaggcctcctgtgatcccactcaccaggccagcagggtggcctcccgcaggttgctgctgagctctgagcctctgttcccacctgtaaaatggggtcaaatccagtccctgcatgccaggcttgggcaaggagggctgagatggagtacacagcacccacatccttcctcaggtctgaggcactcgtcttcctcctcacactgcagccttcactccctctccccagcctcactttccttccacttctgtcttttttttttttttttttttttgagacagagtcttgctctgtcacccaggctggagtgcagtggcgcaatctcagctcactgcaacctccacttcaagcgaatcacctgcctcagcctcccaagtaggacaacagctgtgtgcccccacacccagctaatttatttttgtatttttagtagagatggggttttactatgttggccatgctgatctcgaactcctgacctcaagtgctccacccgcttcagcctcccaaagtgctgggattacaggtgtgagccaccgtacccggcccacttctgtttgtcttccttgctaggccctgggagtctgactcacgatggcctccactggccttaccccttccctctgccttccatctgagtggcccagggccactctcccaccccttaccctctcccaccccagctgggtagcttccctctgccccggcacctggagaatgctgcaggcctgcctgggctcgggccctcacctctactctcctgtgagacccttccgtgctcccctacatggctagccccgcccccctcctctccacttgcctgctggcattcaccaagctccttcctggtgcctgagttcgttcctcaatcctccatgccctgcctggactgagccttcagatcctgtggatgtcagttcctaactctgtcgagatagtgcccccttctctcaggacttccacagccccagcaaagccctggagatggaggataacaaatcttgcccaagggagagtacaggccagtcaagagcaaaggaggctgggagagaacgcagggctgcaggactgagggatccagagagctgagaagagcaaagggccagtgggggtagctgaggtggagccgggaaagactggctgggggctgggctcacccgtgtgaccacaggccatatctcattagagggccctggacaaaacagggacactgtcctggctcagcctctcattgtcttacattgaggcctttgccagcctccctacgggctcatctctaggccaccaccaccagctcctcccccagagtcttcagaaatgaaagaaaatatgaatgaattaatgaaagaatgaagcccaaacttctgtgtcatactggatcacttgaaaaaaattcagaccatgaccgggcatggtggctcacacctgtaatcccagcactttgggaggccagggcgggtggatcacctgaggtcaggagttcgagaccagcctgaccaacatggagaaaccccatctctactaaaaatacaaaattagccaggcacagtggtgcatgcctgtaatccaagctacttgggaggctgaggcaggagaattgcttgaacctgggaggcagaggttacagtgagccaagatcatgccattacactctagcctgggcaataagagcgaaactccacctcaaaaaaaaagaaaaaaatcagaccatagatgtcttgtttgtgacttgtctactttgcagtttactgagaaaagttcaattttgatcagttgacctcaaaaagcgatggattggggaacaattttccgactcagccctgcatagtgactacctgccttgttctaagccagggcaggtagatctcagtaggtgctctttcccctcttctagactgtgcccatggcagacatcattaatcgattgttgtactcttttccatggagccagggctttgcttctaatttcttctcactactgtgctccagagagctggagctaactgctgagacccacctattgctccagtgttaggtatctccaactcctactttgggacctgcagtgtggaaggtgaagcaatgacccagtcacacccatcacccaaccaagtggcagagccactgctggaggccccgcctggagccccagtgccattcacagagccttctctacaagtggactgctacatcttcagagcgagtcatgtcttgggccgtatgttccattttaatgtctcagtcagaagggagtgagctgcaactccatccatccaggcagcagaacaactaatgccacacacccccatccactaggaatgagagaagtccactgggggcaccctaggaagagatcataaggagctgggggtagggacatctggctcacaacaggcacttcctgaagcccatgcagctggcacaggcccttagggtctcccacccatggtcccgtagcctgttggctcaagacactgtgattgtgtagcctgacaccatttccctttctttctcacccacctcacagctgggacacagctgggcaggagaagttcaagtgcatcgcatctgcctactaccggggtgcccagggtgagcaacatgccacgtcggggctcaactgcatgcagcagcggggtccctgccgggctccacagtgggaatcccgagttctctgcacaggcaccagttttttgtcctccaagacccactgagaaaacaccaggccactgcttgggaacagggaagctgccttcatccccaggcactggctgactttggcgatcacaccctttaaggaccctgtggtagtgggtgctggctttaagtctcagccccagtttcagctcataaagatgctcagagatgaaagtgcttttccagaggctcagagaagggcagcactggactccagggggaggtcggaggaggcttgtcctgtcttagcagagggggctgggccagggagtaggagtgaaagggggaccacgggaggactgggaggccccaggtgggggccagcagggccggatgctcaccacttccatggccaagggcagccaggtggtgctgggcagggctcaccgtcagcagggggcggcagcataagctccggatgcctaccccaccttcccaggaagaagacagaaatggatttcagtgggagatgtgagagaacctcaaaagtatccaaaaccagactcaaattataaggcaccgatatgtctactcggtagtggtgaaaaagttacaacattttcttttagacttaaaagaagcaaaaataggaaacaaaccaggcagccctcagccgtgggttggagctccagctctgccctggtcgcatggcctcctgcacccttcgcctcttcgggcctctccttgaaaggatgcttctcccctgggaataagaggtgcgaggcgcctggcccacctctccacatggcagcctggctgccgtcatccctttcctcagtttcccccttcctttctcttcccatctgccttgggaggggcgtgggtctccctgtagccttcagccaaggtgcagaggaagcccctgtccggccctggtcacacccctgggggcagtagagagcatttgcctggaatgttctccacatagggctcccctcaggaccccaacaggaccggggtgcggccagtgatgagaggagctgagggcccaggctgcatctcccggttttctgcccacctggctccccggaagttgtttcgctaaagcaggttgttgctaaccatcactgctgtagctgctgttggttgaaatgaaagttggccctggactaacaggttttttttttttttgagcctgagtctcgctttgtagcccaaactggagtgcagtggcgcaatctcggctcactgcaagctccgcctcccgcattcacaacattctcctccctcagcctcccgagtagctgggactgcaggtgccggctaccacacccagctaatttttttgtgtgtgtgtatttttagtagagacggggtttcactgtgttagccaggatggtcttgatctcctgacttagtgatccacccgcctcagcctcccaaagtgctggaattacaggcatgagccacagcgcctggcgactaacagctttttaaaacagctgctcttgtttaatcctcacagcaaccctgagagctacaggtctcgtcctcgccattttacaggtgggaaaactgaggctctcagcagttaaggccctcacctgagctcccttagccgtaagtggcagagggtgtctgacgctaaagcccatgcgctcgctccacgcctaccttgtcctgcctccctggatcccacactgaggctgggctgccgggtgcaggctggagggtcccggtgggggacagccatggggtgtttcctcctcagccttcattgtaggaggttccggtgctgagtgcctggttggggggctgccctggcagttccttgggagctgggcacctcctggggagcccccttgctcgcctcgcctggcactgattggctgttggctttttccgggtgtctagtgatcatcacggcctttgacctcactgacgtgcagaccctggagcataccaggtaagtctgggctctctggcccctgcagtctccctgggctcaggaagctgcctggaagggctcccagaccctggccagtggaccctgaccccgtggtgggtgtgagtgaccagggccccttgtcagaaccagctgcccacggactacttactgtccaactgcctttatcgcttgagatttgtccctattctggaggagccagcacatgagtgtgagcccagcacagccacccccaggcacgtgctcagaggggccccaacctgctttaatacactgcctttgccatgttgcaagtccggatactttttgaatgaggtgccccacgtgttcagttcactgtgggccctgaaaactgtatagccagtctttgaagtgacatgaatttggcacttgcagtcttgagaagagagaattggcaatgtgacccattcaagaggctatcctacttctgctgggaatcggccagctactagagcaaagccctctcaccttaccttggtctggggcattcacacccagcaacttccaaaccccgtgagggaggcgggggtgatggttctagttgataaacatgcagggctcatgcaaggtctcaccgggagaggccagaggtggggccaggaggggtcttcaccacctccagccagtgctctggtattcccacccctttgggtccagccaacgcccttccggctggaggtgcagcatcctgctcagccagtgtgggccaggaagccctccttgtccctcccagcccagcacttcagccctggggaggtcccaagtgtgccctctgccccctgtttggggtgggaggatgggtgaatctctcagcctctctccttacactccaggcagtggttggaggatgctctgagggagaacgaggcaggctcctgcttcatcttcctcgtgggaaccaagaaggaccttctggtgagcagagtggcactggtggtctgggtggcccttgggaaaatgcctccccttacagccctcattggaggagccatggggagggagggaggcagcacagtgggaagcaggcagctgcctatccccctgggcctccctgcaggagagccgggacgctgggtcaacaagggccatttctcccagtcaggggccgcatgtgagcaggccgaagcagacgctgtgcacctggccagggagatgcaggccgagtactggtcagtgtcggccaagactggtgagtgggccagggctgtcaccatggtggggcagagccctgctcttgggccagtcctgtggggcctgccatgcagtgtttccctctgtagccagtcgtctgttccctctgtggccctggtgcacactggcatcacagccctgctgtgctggtgcctggcagcactttcattgcctaagaggagctgcgtcatctctagaaggaagctgggaggcctgcctcacggatgggggaatagtgaccccaaccctgtgtcatgccgtgctggcctgttctccataaccggagaaccccataactactcataactaccccataactactcatgaggcacgttccattttagtcctgtgaagtaacttccagggccacagggtggcagggccaggatccaaacacaccctcacctgtaaccactgcactatcctgcctctggccctgaaatgccaggcatgtgacatcacctggcatagagaagggcccagtgacaggggctcccatcccttcccagtatcactgtggctcaaagaccccagctctcactgaactcactccccaccgggtctacccctggccatactgggtccccagcccaaggcaagatgcccagcatctttgagcctccatctcatctgggaagcaggtgatgccatccatctcccttttttgtgaaaaaacgttttaaattacaaaagccaggtgtatttactgaggaaaacagaaaatccaaagacacaaagagcagatggcaaacacaggttgttgggggatgaaatgaagtcatacgcagggcctggcacataataggcccccaaggctctggggactcaggaattgggcccagtagtctttaccctgtgtaagaggggacagcagatatctagtcggagactgggtgagcactgagggttggcgtcacaagtagaagcaccactttcagcccagcgcaaacaactggcagtgccttccactgctcctttccaacagtgagaactgctctgtgagaacccttcctcccttatcagagtaacagtgagttcaccgacagctcactatggaccaagcaggactgccctatgcggttgtgcaggttgctggctgcacaagggcagtgtgcgtgttaagggctggaaaccagcccgctctctgatgggcagccacctctacctggaggaggatgcataaaggctccatgtgggggctgacagcaaatcaatcctcacagccccaccggacaggtatggaaagtgacaggagggcaggcacatatctgtcctgagttccacatcttccaacacttgggccatagtagcatctgattggaagagtagatgctgggaagcaaaggctcagaagtttgagggagtggcccaagcaggcagtggggtgggagttgggaggctggagccaggtgggaggccaggccagtggaccctgcccctggcactgtgctgcctgtgtgagtgggtggggctgtgccctcctggggtcattgttactgtcagggtgctctagaaagggctacgtgccaacctgagggtaggctagcctggctttcacacccagatgcattaaggggcaaggagaaacactgatgaggtcccggctgtcttgtgggcccacaggcgagaacgtgaaggcattcttcagccgcgtagccgccctggcattcgagcagtcggtgctgcaggacctggagaggcagagcagtgcccggctccaggtcggcaatggagacctaatccgtgagtataggtgtgactgggttgggctggggagtaggctggaggcctaaaatccacatgcgccatcctcgtcacctgaggccttgccatttcctgaacttgtggccctctcctgtcctttgaccctcctctcagggtgtcactgcagcctcaggcctgtagcccctctgattccacctgccaggtcagacaccctccctagccctccctgttctcctgacacatggacctcatgggcatccatgaggtcctcatagcccaggctgggcgtcccaggctctgcagatgtgtcctggccccggctctcccagtctgcacctttgccctctctgttccagtgcctggaaggccctctcttggcttgtgtcaggccattcaggccttgaacagcaggcccagaagcttcagctcacagctctgactgtcagggccggcatcccctgcccagtgtcagctacaggattcctggttgatgctaaattacttctcccctccttacagaaatggaagggagtccgcccgagacccaggagagcaagaggccctccagcctgggctgctgctaactggggcctgcgtggaaggcctccgctccctgcacacacacggacaggaatttccgtgactgtggtgtggagactggagcccaagctctgcagcgtgtcgccctcaagctgtaggcccatgttccagtccctccacccacccaccgggctcagctccagggcacagtcacttgtccgttgcaggttgggcactagaaaaggcccccactggctgcctgggagccccacaccaccgggccagtgcaggcactgtggtgatcccataaaaggccagtccatttgcagggtcatcagacagtcacctttggcctcaagaggcctcagaactgcaaactcctgcgtcggtctatactactcggccatggcccacatcagcagtcaaccctgcactctttcccagcgatcttggatgtgtccccaggatccgtcacagtgttccaggcaacctggacttgtcaaagtcagcacctgaaggagaggccacctgccattccccctgggagttttctgttgtcagcaggacttatggttctgggtctcagagcttcaggcctcactgtccttctgccacggatgctcaaggttcctgggcagaccagcacctctggaggacaatggacaaaatgtctcttagacctgttctggctgaagggctatctctggcacctctgagatccctaggtcctgccctcctggtccgtgggccaggatgtgcagaacaaccactcaggcctttctggcccacctggacagtgcatttacctgtgtgctgcgggaggcagactgcacagctgtcctagggtaactcactctgcagcccttgaacatggcactgccctcctctggcactcatgctgggcctgtgcccactgctgcctctccatccctctctcattggcctatacatctcttaggacctttgtaatggtgtccatgcacctttagaggacttcagaggccctgccaagtctagcatgttcctgtctccaacaccgcctcctgcacatgcagagcagacagaaataccccacacattccccagcctctctgcccagtatgctcatccacagggttttctcactgctatgaaccagccccacagccccaggcccctgtcacctggctatgcccactcatcccacccgtctcgtgctgttgcttcccgtagatggcgagcaccttgcaggcagccttctgatcagtactgctctcctagggcctggcacactgcagctgccctgtaaatgttcagctcagcgattgccaaataccagttagggaagaacactggcatctttttctattcattcccccttcaacatattttttgtagttttttatataaatgacttttttttttttttgagatggagtttcacccttgttgcccaggctggagtgcaatggcgtaatctcggctcagtgcaacctctgcctcccaggttgaagcgattctcctgcctcagcctcccaagtagctgggattacaggcatgcaccaccatgcctggctaattttgtatttttagtagagatggggtttctccatgttggtcaggctgctctcggactcctgatctcaggtgacctgcccacctcggcctcccgaagtgctgggattacaagggtgagccaccatgcccggccataaatgattttattcatttttatgttttcttttgggcggcgggatggagtctctgtcacccaggctggcgtgcaatggcacgatcttggctcactgcaagcttccccttccgggttcatgccattctcctgcctcagcctcccgagtagctgggactacaggcacgtgtgaccatgccgggctaattttttatatttttagtagagagaggtttcaccgtgttagccaggatggtctcgatgatctgacctcgtgatctgcccgcctcggcctcccaaagtgctgggattacaggcctgagccaccgcgtccggcctccataaatgacttttaaaggggttgtatgtttagtgtgaacaaagacagtacaaagcatataaaatacaaggtgaaagccccccccccgccacattagctgcgcccctgaagtgtctccagcagaagagatggatgaatggaaggacacacagatggacagagagcaggaaagactgttagctctgctaacagtcaggactattccttctggactctgtgcctttgcctgcacagctagtgttgatggcttgtttgttgttttcaccagagtgagctccttctggacatactgcctggcagcctgccttcctagggagctggcgccaaggcctctccctgatggcacacaaggagcctccttcctgtagcagcgcccagttttcatgtggatggattgtagttcatttgaccctccccatccgcgggccatccggcttgtgtccagcttttagctcttgccaatggtgctgcagtggccattcttgtagttatagctttgcgtactcaggaaggcccttctcccgactgcggcccccagcctggtccactaaatgcagcctgtggtcgggcagacagcattggggtccattaggaagaccaggtttgctgggcataagcttcacaggacgggagaacctgcccatggtggactgtcgttctccacagctcccttcccttgccccttcgggcctccaggatatgtttgcgggggtgggtgtggtgtccagctgttaccagcttctgagctagagctgtactgcctcacgtacacccccacctctgtaaatggtccttgattaaatcgtcctcatattacctcctgcaatgtgccagctgattcccacacaccctgactgacatagttgtggcctctcgaactttgatatttggcctgggaggacagaagagtaaggtcgccacggaaacgcaaggggctcagttgtccccccaccccaagttgatgcagcatcttctcggtcagaattgcttcagggtggtttgcgcaccctcactttgatgatttaatgaagacatttccttctttcccagcatcgggcagtaagtttcctgggcagaggcactttctgttggtctggtcttgtgggcccaggcaagcagccccctgcagccaaggtgcggcaatgaccacagtgaccgcgtccaagtgctgccgaaacgcctttttcctcttccctgtttccctggaccctttcctgctctctgtccatctgtgtgtccttccgttcacctgtctcttctgctggagacacgtacctgaagcaggtcctctcctgtcacttcctggctccccagggctaggtcccagggtgctctcgctctggctttcgaggctcctcaccacccagcccaccccacccccacaggcccctgtgctccagtttcatccctggtcacaatgcagtctgcagatgccagacccctcttctgtgcccaacggctgggacacccctactcccagagaggcctctgtggacacccccacagctctcgcagcacttgataccttgagtgtgattggtcacatctgggctttctcccccacccatctgtggaaccccaagagccaggacagtgacctcatcacctctactgtctcccctagcacctctgggaggaagggcccacagtaggtgctcaatagatgtgtaaagaaggcagggaagcaagaaggttgctcaaacaagaccatgttcccagcagacagattgcactctgacccagatgccaccacacgaaacttacacctgcctggggaacaatcctgtgcttggctctccttggtggccagggacagttgtgcctcatccctcacttgcaaaccccagtcctgtctgacccagagaccctcacagggcatcagccagtgaaggcggtttggggctggaggatatgttctgatcttgggaagagcttggtaggagccagccacagaaagtttcagggcagaactgaacaggtctcgggaaggacacttcatgccagctagagaggctctgggcacaggaaagaattggacttcgggcagaaaaatgtttgtgctatttagtactatgtaacaaatcactccaaaacttcattgcttaaagcaacaagcatgtattatttctcatgattctatgatttgaccagctattcttccgctccctgcttggtagctgggccactaggatgactctcccagagtccaaaatggcctccctcatatgagtggcaggtggtgtggctctacctgaatgcttggcagggccttgccacatggcagcttgggcttcctcacagtgtggtggctggtttctaaaaaggactgtttccaggctgggcacagtggctcatgcctgtaatcccagcactttgggaggccaaggcgggcggatcacgaggtcaggagatagagaccatcctggctaacatggtgaaaccctgtctctactaaaaatacaaaaaattagccaggcatggtggcacgcacctgtagtcccagctacttgggaggctgaggcaggagaatcacttgaacctgggaggtggaagttgcagtgagccgagatcttgccactgcattccagcctgggtgacggagtgagactctgtcttttaaaaaaaaaaaaaaaaaaaaaaaaaaaaaaggagtgtttccagagacaagccccaatgtgtaagtgcttatcaagcctctgtttacatcacacttgctatatttggccaaaatggggcattttggccaaatgtccaaagtccagagtcagtgtgggaggggatttcataagggtgtgaagaactggaggtctgatgcattgggggccaatatgggggggtggggtgcaatatagggaactaagggagagagtaagatgaagggctgtgtcccaatgtctgctccttttttgtcctgaggcaaagcaagggctttctccctaagcaacagctccttaccctgacctttgccaatgaactcagcatagaggtgcttcctcaagaaagcctgctttagcctctccagctgggtcaggttgcccttgatccctatcctggtctctttacaattcccttaccgtcctggtggccttggtggtctgccttgttcactgctgcatccccagcaccagcctactaagtaagccttggaatgagtgcacggctagtctcacagtgcagcctcacacgatgttgttaactggtgctctacaccttggatcccaagagggcgaggccagagcccaggtcacccctgaccccagcaggcaccaccacccaccacccactggaacccacttgcagtggaaattctgacccactgttccccaaagcagaagtcatccaggagtggggtgcctcctgggggagtagcaagaggccacatttatggagcacgctctttgtgccagccccgtatgcagtgaggtgctctggaagctcgtttaaccacagcaatgctgtgggctcactaccacccccgccctgtccccgcctgacaggtggggagactgaggtgcagacagctgaagagatgggacacacctgagcacctcctcctcctctgaactcctggtccctcccctgcctctgctgccaaccccacttggagtctaatcccagtgggaatctgctgcaggtgccctcacccctggggctcaatgtctctcagtcagttgccccagcacactgccacccagggtcgaaccccaaaaggagtttattcgcatggccccaaccaagctcagccctcctcagggtcccccagctgagccttccccttcactgccgctccctgcaccctcacaatgtgagtctatgattctgtccttcccagcccagcagccatggttgacagaggctccacagggaccggagcaaggcagttgctctcagcatctttcaaccctgtcccctgggtgcctgcctgcctccccctcctcccagccctgctgcaggcctctggagtggagaggaggccagcaggatccattcgactcacatttcagcctgggggatgggatggaccactgtcagacaaacctcactctctggagggatgcagggcatcttaacccaggagaactcaggtcacctacaatctaggtaactgaatactgaaatggacagaggatcggttaaattgacacgttcactcattcattaactctttttttaattaatttatttttttttttaaggcaacacagccagggtctcgctgtgttgcctgggctggcctcaaactcccggtctcaagcaatcctcctgtctcagccttctgaacagctgggactacaggtgcactactgcacctggcttcattgactaattctcattttttttgagatggggtctcgcattgttacccaggctggagtgcaatggcgtgatcatagctcagtgcaactttccatcatcaagcaatccccccaccccagcctcccaagttgttgggactacaggaatgagccagcatgcccagctaatttttaattttttttttaatttcacagagatagggtctgtgttgcccaggctgcactaattcttacttgttcatgcattcagctttcctggagccccctttctggcccagccctttgcattctcccattcactcctcccgcagcccacacggcagatgccagcccgaccccattttcacaggtgagccaggcttggcatggggcataagccctgggtccacacaggcagggctagactgggaggcagctccctccagctcttgaagtcctgggcccccggggatgctgacaggtagccaaggaatcccaggcttggaggggactgcagagagacacagcaaccaagggagcccaggacagggatgagagaagacatgtggggggtttcagaggaagaaactcacagcacagagagggacccctcctctcctgagggagaagcggctcctggagactgggtggaccctgggcaccgctccccgccacacacacacacagacacctgccgcttcaggcactgtgtgagatgcgatgccctcccagcagttcccaggctcctctgccatctgctgtggcctaccaatgtcatctcccatatgtcagccttcccctgaaggaaactgatgagcagccaggacgtatgactgtcacatgctccttccaggcagcacagacccttcctggcctcctcccctttgtccaggcaccccctcagtattcagggccaccagccagtgtctaagcctgggccccaggaaggtgagggagcaggcatgggactcctgtccctgggcactgtcagcaggctcaccccttgtcttctgggatacatggtgggtggtctgggaggcaaaccaggtctgggctccctcttccctgacaggtggttggcacccctagcctgagggtacactaggcctctgctcactggaagccacagcctggcacaactcactggccctgtcttcgggaacgagctcatcttgtcccagcaatttcgcctcctgtgaaggctgccaatggtggccaggagactccgctgggattctcctgactgcagggacctcatcaataattgattctgcagaaggcagtggagttcctgaggaggggcccaggtctggaagggaaggttcacagccccagtcactcggaacctgggaccagcagctccacaggggctcgtttctcactggacaaagatggccctcagatctttgctccgcactctggctgggggcaggaataaaggacagctgtattgatggcccagttttctgatcttgcccccagctccctatggttgatagatgacagatgatggatgacagatgatggatggtggtcacatggccacatcccacttgaagggagccctcctctggcctccagcctcccaagtgggtggggacaggggtggagacagcgcggaaaaggagcaagaaagaacaaaagctcacgcaggcttttaattcgggctcaggcagatctgagggcagaaagcccagccatctacaatgtcttgcctgatggtactgattgtgactcaggaggttgggctcaagtctgggcccccagttattgctatgtgacttggggaggtcactctctgagcccgtttccctgcctcttgttggggtaatggctggggaggtggaaagaaatcacgctgaaggacctcagttccaggctggccccctggtgagggctggttggataggacccctgaagactgtgtgaccctcatgagcagagccattgcacccacccacaaggggcctttgggtgaattagaaaaaggtaccttggctgggtgcggtggtgcacacctgtaattctggcactttgggaggtggaggtgggcggatcgcttgagctcaggaattcgagaacagggcaacatggcaaaactgtctctacaaaaactataaaaattagctgggcatggtggtgtgtgcctgtagtcccagctacttgtgaggctgaggtggaaggatcgcttgggcccagaagcttgagactgcagagagctgagattgtgccactgcactccctcctaagcaactgaacaagaccctttaaaaaaaaaaaaaaaagcaaaaaaagaaaaagccacctgtgcagttccccaaaaagtcaaacatagaattgtcacatgacatggcccagaaatataccgttcctaggtatatcctccaaagaactgaaagcagactcaaacaagtacattgccttagtgggagcctgccatagtctaggtggtttttagaacaacagaaatttatttctcacagtcccggaggctggaagttccagatcagggtgccaacacggttggattctggcaagggcccttttctaggtcacaaactgtagaattc

SEQ ID NO: 21 - DNA, 175100 bp, Homo sapiens
gaattctggcctcccaaacaccagcatggcccctgttcctacaatctcctgcttcaagatcaacccaaccctgctacccagaccagatgctagatggtcaagacagggctgtgagagctaaagaatcttcagggtccacgatgaatttacattggagcttccttttccacggatattcacatcaatagagaagatgactgagttcttgcctacctctgtgaatacctgagacatgaactgagatgtgtgtgtgcatatggtgcgggcagcacttcctcactcaatactagggagagtgtgaggaaactggatacagacctggagatagggcacatttttacactctctattaagccctgtccttctgtgctcaccaaggagtcacccaacaaggccacaacaggaagagaagcaggtttctatgaagagacttctctttttgtgatgagggcccaggaagtccactgtctagctatgaactcagaggcagaactctgatgcatctccaccatgacctgaatccctctcctctactcacccttcctgctgtcggcacaggttctgccttccagggctcagccccataagactagggatcagcctggccctgaccttcagctcagcacagggagtgacgcagtgtgtggggctctgagaatgagaccctcatcttcagactcacctctcctgtcctatcttgtaggctcagtggcctcctctgagcggactcagttgcctgcagcgtctgtggctttgggacagagggccaggatcacctaccagggagacagcatagaatacttttatgcaaacttttgtaccagcagaagctaggacaggtccctgtgctggtaatctatggtgacagcaactggcactcagtgattcctgaacaactctctgactccatatcagagaacatggccaccctgataatcaatgggccccaggctggaaacaaggctattactgtcaatcatgagacagcactgatactcatctcacagtgacacaggcagacaggaaagtgagacacaaaccccttcccacctatgtcaccctccccctccaacctcaggaggacagtggtcagagctataagcaggtctggcccagttcactcagatttgagacccccaggctgcccttccctccagccttccaggcaggctcagcagagtgtaaattaagagtggatacacaatgaattattagaattgtatttcagtttttcaagaagtagaggaatgattgaacatgttaagtggaagtatagaataccaaaaaaggactaattgagcttgtactgctaataattacagcatctgagacattaaaaacacactggatgtgattaacaacagatgatgcaacacaaaagattagcaaactcaataatgtagcactagaaaatattcaaaatgcagcacataaagaaaaaataatgatgaaaatgaagagagtgttacagtatatttatagaaaaaatgaagagtgagttataggacaacttcaaacagcctgaggttggctgggaggggtggctcacacctgtaatcccagcactttgggaggtctcggagggagaatccttttgagactagaagctcaacaccagactagacaacataacgagacttcatctctacaaattttttttaagaaaattaactaggcatcatagcctgcagctgtagtcctacctacttaggagcctgagacaggaagattgcttgagcccagaaattcaagatggcagtgagtgaggtacgatcatgccactgcactctaacctaggacacagagcaagttcctgggtctcactctgtggttcaggctggagtgccatggtgcaattacagctcactgcagccttgacttcccaggcccaagagatcctcccagctaagcctcccaaagtttctgggactacaggcatgcatcacatgcctggttaattctttgtattttttgtagagatggggttctccctatgttgcccaggctggtcacaaactcctgggctcgagcaatcctcccgactcagccccgcaaagtgttgggattacaagcataagccacgccacctgatgtgaagaaatatttaaatacaacaacctaaagtatgtataattgacatccatggaatagaaaagatgaggtggagggtcagtagaaaatatatttgaataaataatggccaaatatgttccacatttggtgaaaaccaaaaattggtatatccaagaaggtcaacaaaactcaagcacaggaaacatgaagaaaacaactccaaaacacatcataatcaaattataaaatctagtaatgaatacccactttaaagtttaattccaagagcacatctctcattagaagtaatgcaaggcacagtggaacaatatttcgaaaatgctgaaaggaaaaacttgtgaaccttctgttatttatctaacagaaataacattcaagagcggagggtaaataaaatgttttcagacacataaaaacttacagaattgatcactatcacttttggcattagaaatggtaacagacatccatagacagaaggaaaatcatacccagttgaaaagcaaattcacacgaagaaatgaaaacttcagatagggcaatgacatggatacctatagaaacccctgtattatgttaacatctatgaaagataactgttcaaaggaaaattagtaaaaaaatcactgtgatttattgtgaaaacaaaattaaattatatgacaaacagcacaaaagcagagaggagtgaagaacatgttataatggtcttataccctgtatgaatatctaatcacacttgaagacagattttggtaagttatatatgtaccattaaccctgaagtaattattaaaataaacccttttaacaaaaaagaattatgactagtagtaacctgtattaggattctccacagaaacaatatcaatcagatatgcgtgtgtgtgtgtgtgtgtgtgtgtgtgtattgagagaaaaaagagtgaaagaaatgtattttgaggaagtggatcatatgattgtagtggctgacaaggattaaatctgttgggcatgctgaagtctggaaattcaaataagagttaatgttgcggtcatgcatgcaaatttagcaagccagcacatcaggaaatctccatatttgttctaaataccttcaactcactaatgagtcccacctacattgtgcagagcaatctgcttatacaaggtcaactaattaaaatgttcatcacatctgaaaagtatcttcatgttaactcctatactggtgtttgacaaaatcaacctggcccatatcctagcctatctgacacttaaaattaaccatcatttaagccagaaagaaaattttaaaaatatttctaaaaataaatcagaaaaggaaacaatagaaggggaaaaataacgaacatatgggatgaataaaaaatgaggagcaagaaggtatatttcagtaggattatattactaatctcattaattgtaaatggtctaaatatcacaactaaaatattgtcaaattgaaattaacagcaagactcaactatatatgctacctagaataaacctacttgaaattttagaaccacaaaaagccaaatacaaatcaacgacaatcttcccaacccctggtttcccaacaaagcattacaaaccgaattcacagggattaacacatagttaaaaaatatgtctcacttccaccaacactcttacctctcttcagcctctaatgcctagatcccagtaccagagttgcaagaaaacagggcacacaaatgttaaatcaaggttactaagggtcaccctcaagaggtaggtgaaaagagaatgagggaattgaagccacaagggtcccacttgcatggggcagctcctgcatcacaatgttgattgatacattattgatgagtttttgtccatgttcatggtggacataggtctataactttcttttcttgtcatgactttggctttggtattggagtaatgcaggcctcaaagagtaagtagaaaaatgtttcccctgctgtataatctgaagaagttcttgtaggattggtatcatttcttaattaaaaatttgatagaaatttactatttaaaactgggtgagcttttcttagcaggaagacttttaattgccaattcaataccttcaaataccatagatctatttggattttccatttcttcctgagtcagttttgatcatttatgtcttttaaggaatttttccacttaagtcatttatacttttggcattaattgcttgtaataatttccctaaccattttaacttttgtaaggttggtagtcatggcactcttttatcatggttttagtactttgtgtcctctttcatgttttcctagtcagtctacctaaaagtaaaatcaataggttgtatttatctttttgaagagccaagttttgttttttagaggctgtctattgtttttttttgctatttcattaatatttggctctgatctttcttattaacttttcttttttttgctttgaatttaaatgctcacctttagcctaaatttatgaggtacaagcttagataattcattttagatctttcttctttccaacattaagcattaaatgcaatagatttccttcaaagcactgatttaagctgtatttcttaagttttgatatgttgtctttttgtgttttaaaggttcagtatcttctaatttatgttgtgttttttctttagctcatggattacttagttgtgttctttcctgctcaaataattgaagatttcccatagttcatcaggtattaatccaatttaattaattattttggcattaaataataccttctatgatattcatccactgaaatccactaagatttgacttgtaacctagaacacagattatttcaaaatcatttaaaaatgtgctaaatgtatttaaaagcataatgggtattctgctctcatgtttgaaagtgtaatgggtattctgccattgtgggtgtagttttctacaaattcaattaggataaattggctatttgggaggctgaggcgagcaggtcatctgaggtcaggagttcaagaccagcctggccaacatggtgaaaccccgtctctactaaaaaataatacaaaacttagccaggcgcggtggcaggcaccttaatcccagctacttgggaggcagaggcaggagaatcgtttgaacccaggaggcagaggttgcagtgagcctagataaagccattgcactcaaacctgggggataagagagggacttctctcaaaaaaaaaaaaaaaaaaaaaaaaaaagataaattggctgatcattcaagtctgtatcttgattgaatttctgtatagttgttgtgtggatcaatgtcagggagctactggaatgatttaacactaattttagaatttctgattgattttttgagagaggaaattttcatgggtctaagtactttattcttctgacaaaaggccttttatgatttcccaagactaatctaggaagaaaaggcagagttcaagccacagttggtgataccatgggagcactgaatgatcatgtgaggtgcctccactggttaggtgtatgtaaatgaagattttttaaaaaactaattgggaggccgggtgcagtggctcatgcctgtaatcctagcactttgggaggctgaggcaggtggatcatgaggtcaggagatcaagaccatcctggttaacacagtgaaaccccgtctctactaaaaatacaaaaaaaaaaaattagccgggcatggtggcaggcacctgtcgtcccagctactcgggaggctgaggcaggagaatggcgtgaacccaggaggcagagcttgcagtgagccgagatcgtgccactgcactccagcctgggcgacacagtgagactccgtctcaaaaaataattaaaaaattaaaaaatacaaaacaaatctgggctaatatgtccagaaattttgagaaaatgtatgttgaataaagcatgaaaatgtaaagcaaggtgattgcatatgtataacattgctaccacaaggccaacctcatgggaaagaaacaaaaactgttagcagttcattatgtttacttacacactgaacaaacatgaattgaaaccaattcaatgaactgtcccagatactgtttaggtacttgagatgtattggtgaacaaaagagacaaaagtacctgatctcacagtggcattatgaaagatgatggagtaggaaattccaggaaatggtcctttctgtgaaataactactgaagggtaagaaccatcagaattaaccataataaaatgaggaaatctagtcccacattcgcagcattgaggcaagtactgatgaagaaagaaacaggcataagaaaatctctgtcaggttaatttttgcccatagaagtaactgaacagaaactttatggatcactctgataacaaagtccttgcaaaattattttggaagagtcaactacacaaacgaataactgcacccttgagcagcaacatcagccaagaaggagtagggagacaatctgattttgagagttacaacatcacacattcaaaatacacagatttcaacaaaaacttaaaaagcagacaaagttaaaaggaagcatgacccatttacaggaaaaagtttaatgaactgaatgtactcacaaggaagcaaaggcattggacaaatgacacaaatacttcaaataaccatttacatatgttcaaaaattcaagaaaaccatgcgagtaacaaccaaacaaaactggaagaataatgttagaacaagtgaggactatcaataaagaaaaagaagttataataaaagaacccaagcagattttctagaactgagaagttcaatagctaaaatcaaaatttcatcagataagttcagcagcagtttgagcaggcagaaaaataatcagtaaacttaaagatacattgttgtaattacacagaatgagcataaattttaaaagaataaataaaatgagcagagcctaagagatacatgggacatcatcaagcatatcaatatacgcattgtgggagactcagaaggaagagaaaaaagaaagtataaaatacatgtaaaaataatggctagaaacttccaaaattgatgaaagatatgaatctatactttcaaggagctcagtggccttcatcaggttaacctgacacagactcacagtgaggcacaatatgctcaaaccatcgaaaaccaaatacaaaagaaaaatattgaaagcagcaagagaaagagactcatcacaaacagtagattctcatgaaattaacatttggtctttgatcagaaacaaaacagtccaaaaggcagcacaataatctataaagtgatttataaaaatatattatctaccaattctgcatttagtcaaacaaatcttctaaaataaaaaataaaataagataatcatagataagcaaagtttagtagacctggtagatctgccctaccagaaacactacaggaagtccttaagtctgagaaaagacactacataatttgaatacatgtgaagaattaaagatctcttttaaatataaagctagtgctgttgtattgttggtatggagctgctgtgttttccatgttatttatgagatatatggaaaaaaatcaataattataaagccatgtacataggcacaaaatgtttaaagatgttatttgtgacattaacaaggtctaaaaggagaggaaatggaactggataggaacagaattaatggatattattgagactaagttcgtagcaattctaacaattttaaaacattaatcgttactccaatgataactagtaaaaactaaattgagtgtataagggaaagaaaatgaagaaggaatccaaatggacccagaaaaaaattaatagaacacatgggaaacaattattggggtaatttaggaacaacaacaacaaaagataaaagatatgtagaaaacaaacagcaaaatgacagactttctttgttatcagtgattactttaaatataaatggattagattcaccacttgaagcaaaataacaaaatgaaatttttaaaagtaaaaaaaaaaaatagaatccatgatctatctacatggtgtttatggagaaccaatttagacccaaagacacaaataggttgagtaaatagtaacaaaagaactggtgtggctgtcgtgacatgatgcaatattgacgttaagtgaattatagttgtaagtgagaaaaaagggtattccttattgataaaatggtcaattaatcaagaagatataatagttatacacacgtatgcaccaagcaatagcacttcaaaatatgtgaaggaagacacatttaaaataaaagctagagagatctataatataaattggagacttcagtaccccactttaaaaaagaatagaacatatgaacaaaagattaatagaaaatgcagctattgaacactataatccagctagacctaacagatatatacaaaatactgcacaaaacaaaagcagaatacacatctactcaagagcacatggaacattctccagaatggacgctattttaggccttaaaacaattctcaacagttttttaaaacttgaagtcatacagggagtcatctaaaaccaccaggaaacgaagtttgggtaggggaggaacaatatttccttctactcaacttagatttattggccagcagtccctatcacacaagacagattaaaaaataaactcatgcacatttattaaatataatttttacttggcatgggagctttaataaggaaatgaaaactcagagaaatggctgaacctgaggactttacatttaggtatgatgaggagaatacaggtgtggagaaatatgactaagaatgaagtaaatgcagtaaatgggggaaagagcaaggcctgtgttcattcttctcagcacaccttcattttagaggaaacaatgctctcttttcctcttctttctaatcaacaactcaactttacagctcatggaacaagaaagagaaaagcaaacttaaaccaaagtccacagaaggaaagaaataagaatcattagaccagagattaaagaaatagatgagaaaaaaaactataaagaatataaatggcataaaaagttcctacttggataagaagaagaaaattaacaagctgttaggcaaaccaactaaaaccataagagagaagacacaaataacaaaaataagaaatttgggataatacaaccaacgttatgggaattaaaatgattataagagaacaccataagcaactgtatgtcaaatctagaagaaattgacaaattcatagaaaaatacaaattaccaatctaactgaagaagaaataaaaaatcagcataagaaatagattaagtcggcaattgacaatttctctaaaaagaaaagcccagagccagatgtcctcactggtaattctactagagatttaaggaggaagtaataccaatcatactcaatctcttccaaaaatagatgaggagggaacactgcctagcacattctagaggccagcattagcctcgtagcaaaaacaaacaaggatactataatacagaaaactattggctaatactcctgaagaataagcatctaaaattcctaaattaaataagagaaaaccaagtctaactacacattaaagagaacacatggaatgaaaaagcgagatttatcccagaattgcaaggatggttctacataagcaaatgaatcaacgtaataaacaatatcaatagagtgacaagaaaaagcatatgatctcagaagatgcagaaaaagcatttgacaaagttcatccactttcaagacaaaaacacttagcaaactaggaacagaaggaaacctgcacaaattgattaaagaagggcctttatcaaaatccacagtgaatctcacagtaaatggtgaaagagtgaaagcctccccacaaagatcagaagcaaaacaaggactcctgctttcacagctgctattcaacattgtccaagaagtcttaaatttcattaaaacaaaaaaggctagtgctacctcccaccacaagcatggatcagcgttaggaaattaaaataatggtaatagaaaaattataatgacagtgatgatggtgatggttttttaagtacacaactgaggtttagtggcagaaatccggtacttccaattacagtgcagctgtgcttattggggtgacggaatcaatctcgttttcagtatacatgggaagcaggagtacatgtagggtacaactgcatttctctggaactgtttttcacagaagagctacagtttatcctgcactctccattctgtgatcaaaaaccatgaaacagagaaaagcacttcaacctgagactcagtcacaagaactgcacctgccccaccttcccgcaactatatatgccacctctctgtgctgaaccatgaaggccagaggggttcacatgtggcacagacggaggctggactccctggtccgcaccctcccaggtgacgggtgctctgggatcacctggagaaggcaagtgcctgggctctgtcttttccaccagcagagggcagcagagctgcagccagaagagaggctggggctgcccaggaggagcctatgaaggaggccagcctttgtggggggtggtcaacaggtgttcaagggatcagtcctcactttggaagtttggtatagtccctcctgtcacctggggctgcagtgttcatattctgagggtcagacacacagcatcacccaggatactgacaggggcccaggcacagtgacggcctcagctgggaaacacaactggaggcacctgggccctggtgtcagcctgggcagctcccatagggctaggatttcctaagagacgctccgaggtcaaggtgctctaggagggggaacagtgtgaggggacagggctcccggggctcaagcccttcacccaggatggctgcctgagcctcctgccattctaagggtctcattcctccgtgtccagcagcatcctggggagctgagccctctacacttggcacttccagagacaccctaccaccccctccctctccctctccttccagctccaggccgactctgactcagaggcagctcctatgctcaggggattctcaggtgggtggcgtgggacatttgggatcctggtccctggatggggcattcccagcctccttgcggagatgctctccagagggaagggaatgttcacctgcctcaggccacagctctgaccatgggactatcctgggctcagtgacaagatctgtctggctggagggaccagggatcccccaccctccagagctcatgggtgttcagagaccacgacgctggaaccctcacagagaccaaataacctaaagttagtttctcagtcaggtctgggtttctggtgctttttacacatttatatgaaacactgatgagaaaaaataaagaatcaaagagcagaggatggcaatttctagtctattagagagatggggggtgtcatacaaggagcaactcaggtgagaaacgagactagactgtgtaatgaatccacatgagttgtggctgctcaaaggaccaaaccatggtaatggaaatcaagtttaggatataagtatcctaaagacacagaaccacattctaattaaactaccaggacaggaccaagtgagtctgggaaacccagagctgacttggaggaggaggaagatgatgggttcctggcccacctgctgctgagtcaggtgtcattgatgatctctcagcacggcccagctcagccccatggccaggctcctggaaggtccacagccctgctgagcctggcctaggacacagcacaggccaggatggtataaaacagtggtcatgtggccaaactccaggaggtgactgtgatcacaggccttcaaggatggagtctgatcttctgaccagagaagcagataaagtgagctgggacccacttcttcttcctcagtctgctgtgcttcccacagagctggtttgagtgacatccttcagtgaggagtcccagaggatgccgatttgcatcaaacactcactgcctcaaacggcctgagaggcaataagagagagctggtgagcccagctgtgctgtgggctcaggaggcagagctctgggtgtctcaccatggcctggatccctctcctgctccccctcctcactctctgcacaggtgctgcccccaagcccttccttcaggctcagaacccataggatcctgagctgggcctgcccaaacatgagttcatcccaggcacaacctcagggtgggaccccctgggaacagattcatcatttacaagcctcctctcctgtcctctcttgcaagctcctatgagcttacacagccaccctcagtgtcagtgtcaccaggacaggcagccatgatcacctgctcttgagataacctcaaagatgagtatgtttactggttctggcagaagccagaccaggcccatactggtgatatatgaaggcagcaagcggccctcaggaatttctgattttctgagtccagctcagggaacatggccaccctgaccatcagcagggctcagactgaggacgaggctgactattactgtcacaggtacaatagaaacagtgatgagcccacagtgacacaggcagattaggaagtgagacacaaaccccttcccaatctgtgtcaccctctttctccagccccaggatggctgtggacaaagccatgagcagggctggtccagttcacccagttctgtgacccccaggctgctcttccctccagccctccaggcaggttgtgaagagggtgagttaagaagagatttgaggctgtgtgacaggctatcctggggtttttctggccaaggataaagctggtgaaagagagcctgaatggacgggcagacagagtggcccatgcacgtagtggcaaaagacctgggtttccacatgccagcccttcaggcaggctctgcagagagtgggttaggaggagatttgaggctgtgtggacaggctgttttggggttttctaacccaggataaagctggtgaaagagggcctggatgaaaggacacacaaagcgtatctttcatctagtggtaaaggatgtgagttccatatggtgaagcctgggtcaccccttggcccagacgtcctaggttagtcctcagcatttccctagcacttaagttcctgaatctcctggcagccttatattcaaaacggtgtaagctggagtggacgctgtggggtccacctagactccacgttaaggtcgacccacacactctcagagcctacgagtggatacccatgctgtggggcacatgtcacctgacagagtggctgaccacccctgatctcttctttctgaccacttgggtgtttggcactatgtccatcatggacactctatgggctattaacctatgattcaaagtttcttctgtgtggtgcccgtgcccaaagaccacccacaggcttctgcccatactccacttcccccatttccaagtttttctcttgcagtccctggaacacctgcccaggtcatttcccactgccctaagcccctatctgccctggcatccggccactcacctttcctcacaaaatgaatgaccaggcgccatgccctcatgcaggaaagatgtcccctctccattgtctcttaatgccaccccttagtacacccatatagtgcagctgtgctctacttcatggtgatccagttcattgctgggctactctggaaatttttgctccatcagctgagcagagggactgctacccacacaacgtaagtgtaaacccagggagcagtgctagagcaagagagatgcaaacttggctgtggaccacccacaggttactcagctctggggccctgctcctgctccatcctagctgtgtcacatctgtctcaccagggatcgctgctggggtctgcctgagcacacgacgggggaatctggcagttctggctgcttggtcactgaatgtccgatgctgtcctgtatctaccagggaacaagagcacatggggagagttgttttccaaatgaatataattctctcttgtggatgacatggaattgttccaaatcccatgggattggaatcccattgggaaaatctcatgggattttcccatgagagattgcgtaaacatgagttttcagttcctatcataaattcttccattcctatcaccaattctgtgactatggtagagtctgctggattctgtggtcccaacagcaggacactcatacccctgcctgaacctggtgcagaacctccctgctctgggctccaaaacagtgggcgatgttcatggctcctgatatatgagttggagccacatccccaagggttaaatatgctgcctctagacaccagaatgaccttaaagctttgtgtttctttctggtgggaattgtaagatctaataacgtgctctttattttgtgagagatactaagctgctccagagaactcaatcctaaacatttcagctactacacaggatgaatggtcttagggcttgtttcgcactctcaggaatgcgtgggtctcaccaaagcttccaatagacagggccccctcatgcacatctgatccaaatacagaatagagccctaggaggttctcctgggtgttcagatggtcaaagcccctatgacaatatcatgaaaaagaagggagagttaatgaagttgaaaaaataaaagtataaacctatactgctgtctactccttgtatgcacaccgtttctgatcctgttctgagaggaatagaatgagtttctgcattgatggtgcctgctgtgcacctgtagccatgcatggtggtgtgttctatcagggtcttcatctggcacagcaatggcagatggaactaccagctgactgcgtctgtagaaatccacttccatcttccaggatccattcaacaattgtaggaatcatttcagtaaaccaaacacaagagcctcaactataactacaagtcctccaggagaggagaacgctgtctcagagggtgcattcctactggaatttctcttctctttgggacaaaccagcccagaggaggcacaggggctgtgtgtcatctggtttcctagatgaggtgtctcctcctcactgtcctgagattttgaagaaactggggagattggtgcagacactccttggatccttacaggaaacttccttcagaccacacactcctcaatttgttcccaagctccaaagtttctaaagtcactgtctaaagggcccacagtgtttttgtggagtggtggaaaagctctggggatggaaagtggtggtggttgcaaagcattctgaatgtacttactgttgctgaatgcacacttacaaatgattgaaatggtttaaaaattgttcattttgccataataaaaatactgcacactctggaggaaagtaaacctagtttaattttgaaattgttcaatggataccaatcaaagaatagtgtagcaagcaccatttcccctctcgctatagcagcaactgatccccttgtgctcttttggactctctcccctgctctctctctctcaataataagcaatgctcttctctccagtccaagctcacacttccccagttgtgcaggaatgcctattgtaactgttaatttatttccaggcagagtcctcaagattcctctgctcatattctgttctcagctgtctggagccagcatgacaagtgagccaagatcacttgtcatgagagacttgtggaaggttttgcaaaaagttccccaagaaaaaacaatgctcattgttgacagcaggtccatttccacacagtagggccatgctgggtgtgcagtggggctgtgcacactgtgcccacaggccaggctctgcactgctgactctgatcctgtgcttggtaggaccttgtgcactgctgagtccactgcagactcgaccctgaatgggaaggtggttcctagctgctgggcactgagtctcatagagggacagatggtattgaggatgcccggcccctgatgtacataaggggacaaggtctgctggtagaacaggaagatgaaggaacctgtggctctaaaggtggggtctccagccctcagtctcagctgcccatggcctcatctgtgtgcaccttgtcaatccagaccatgtgaattagaggtgaagggaattgaaggactttcccattttctcccattttctctcttggttacagaacgcacccttccacatatactgtattagagcctgtgctctacaaacatacctgacactaaattagtgacttttgaaagtgcagataggtacagcaaccagtccctctggagacatttcccataacatgaaccagtgaacccatctctgaaagccctcatgttttaaaagacaagatttttgaatttcaaggaaaactaaacctttgaaaaaaacatgattcaaaagagaaccttgccactttccattcctgcttgggctgcagtgaggacagatgcagcaagtgcttctgatgtctgtgtctgttcccctgtgtggacgcacatatccaggcgagtttcagtgaggtaggagacttcggcagcattggccgggctctggtttgcttctggtgctaacggaacatggaagagaggacaaggtagcgtgtcctgaagatcacatatttcctttttgcaggaagtgcctgggctcctggagtgttctcagggctttgatccaggccaccggctccgcaatcaacatcactgatatttcagcaggtcattgacctaattccattttagtgctatctcaaatggaaacattattttcttgtaactattcatatagcaacatagcacttaaatatctaaataacacacacagaaacagtagtctcaaatgcaaagctgtcacctccccacaccacacactttctcacccgagcccctgagcccacccttccctcggccccccctctcctgtgctgttagaaatctctgtcttctaacagggacagtgacacaaaacagccccccctcccgcccagcactcacaccgcagagcccctagtccatctcctgagggaacgtttacgtttctattctgacagagagaagtcgccgtgaatggagtctttaccccaaacccaggagtttctgaggaacacatggggtcagccactgtctgtgtggggaggcttcacctcagggaggcgcccggctctgggctgagggggactcaacgtgcactaaaaggcaggactaaggcaagtcccgggtcacagtgtgagggacgcacgcgccctgaggaggggtccctggtgctaggcctgacccaattctaaccccaggcacctttcctcagctcctgtggccctgggacacctccctaccctgcttcccatgaggctggtcacagctcttgtgagcaccgcctcctccatgtcacactttttctgtcaacattttgaggagccagttggttttctcctcattccatgttcctgtcccacctgcctgctgggggtggatttatttcatgtatgaggtttcctcagcctgagccacagctgcctcaaggacaccaaccctgtgggacactcctctgggaaaagcaaacaagtgccaagaggagcatctgaagctctggtgtgggagatgtcctccaccctgggtcaggggagtctggaggggatgagaagggaccaggggcctgggattgagctgtgaagggaaccaaaaggcaggagggacagggcaggggctgtcagctatgactcaggggaggttcctgggcctcaggatcctccctctgaggccaccagggggcgggggtggcacatgcctggacctgggaggtccctgctgggcttcaccctgggtgggtcctaggagctccttcctcctaagtccccctaaagagacagaggcattctggggtcctaaatctgtcatgcccccataaatgcatttctacgagggccaataaatgaactccaggtttatccaagcagcagcttcaggcgtctgcagacacagagcggggaggaattagccaacctgaggcaccctagaagggctgaagggggctgaaggggactgaagggtccctgtggggcctgtggtcctggggaggggagagctggggtgtctcccagccactctgggccctgtcctgacacttctcccacaaagaagggaagggaaatcctgggaccccacagccaggaccaaccgtgaaccacaggacaggaaggacagggacccccaaggctggctccatttcccaggcactgtcatgggctgagtctcaggaaatccaagtcaaggagtttcaatccccctggctgagccccactgtccaaggaaacagaagtctacgggcccaggcccaggtgagggtggggtaagaagaggagcttaggatgcagatttgcatggaggccccgccctcctctgaggcatcagggtaagacaaggctgggggcaggcccagtgctggggtctcaggaggcagcgctctggggacgtctccaccatggcctgggctctgctcctcctcacctcctcactcagggcacaggtgacgcctccagggaaggggcctcggggacccttgggctgatccttggtctcctgctcctcaggctcacctgggcccagcactgactcactagagtgtgtttctccctctttccaggctcttgggcccagtctgccctgattcagcctccctccgtgtccgggtctcctggacagtcagtcaccatctcctgcactggaaccagcagtgatgttgggagttatgactatgtctcctggtaccaacagcacccaggcacagtccccaaacccatgatctacaatgtcaatactcagccctcaggggtccctgatcgtttctctggctccaagtctggcaatacggcctccatgaccatctctggactccaggctgaggacgaggctgattattagtgctgctcatatacaagcagtgccacttaaccacagtggtccaagttcttggggaactgagacgaaaacctgccctgggctctcaggctccctttttgctctgaagatgtttcctcacccagtgcaacgggcttcctgaagcacagccttgagaattcttctccctcagcaactctcttttcccaccatgaaatccaaaggaaacctgctctgtggtttctcatccaggacagggacagcttccttttgcttgtgtgttgtggtccctgagtgggtgcaactcttcctagctttttaaattatgggagggtgacaatgagctccctgactggtgcagtccctgctgttttcaggaacatcctcatcctaaatgcatctgaatctcccactgtgtgcagaccaatctggacagatgttattagggggagtttccagaagccacatcttactcaactctgtatccaccacactctggtgaagatgcttttttggtgcccatcctcttgggtaaagtccactctctactcatgacagccatgtgtcccatcttctgaacttgggaaattgccacaccaaaccctcaggctcagggcccacataggagctcagaaagacgcactgggaaatggagaagagatctgcatccacccctcagtggagagacacctaactagataataagataaggaagtaggtttgcatgatgagtctccccttcttatgataagagagacctagagacccccttctcaggtgtgcgctcagaggcagaactctgaagcatctccaccatggcctggacccctttcctgctcaccctgctcactctctgcacaggtgctgcttcccagggctcaacccccacagcaccagggaacagcctggccctgactttcagctcatcacggcagtgatgcagggtatggcactctgagaatgagaccctcatcttcagactcacctctcctgtcctcgcttgcaggttttgtggccttctctaagctgactcagctgcctgaagtgtctgtggctttgggacagatggccaggatcacctgccatggagaggacttagaaagctattatgcacactggtaccaacacaagtcagtccaaacccctaatctcattgtatacaatgatagaaagctgtgctcagagatcactgagcgattctctggttcctgctcagggggaacagccacactgaccattactggggctcacgttgaagacgaggctatttttgtttttctggagataaaaacacattcatagtgacacagacagatagggaagtgaggcacaaaccccatcaccatctgtatcactctctttcttaagccccaggagtattgtggacaaagtcgtgagcagggttagcccagctcagctggatgtgtgaccccgaggcacctttcactctagtcatccaggaaggctctacagagggtgggtcaggagaaaatttggggctgaaaactaagctgtcctggtgttgtttagctaggtatgaattggcttaagatgacctgactggtaggacagtcacagcaagataaccattgagtaatcatgttgcctggatttccttttgtttaatgaccaaacctaaggtagctctctggtccaaaatgccctggattagtcccctggactcctcattctttaactgagacctttgatcccagctgtcatggcatcatgatgtcgtgaacagggaagtccattgtaatggcaactgtgacatcaggggtcatttacccactatctacccaaggccgcagggaatccttggcttctcacagctttttctcaccggaaaatgccattgagtgcagagtactgtgtcttccaaggatgtgccccctccataatgtggtttgggagcaatgattgcctgatgcctagattccaaagccatgctttaattcaggatgaccttgaagtgcctcctgctgagtgctcaattgtaacacattcccagaagagcctcccacacttattttctgggactatatacccgaaccctactgcatggaattcaacctctcagagtaactttccaagaaacccaaaaattaaaaactaaacaacaacaagaaaacaatatagagagaagagtatcaaagaaaagcaagttgtacaaagagagaactctggagtcttcaaatattaataagcatcaagcagcacatgtgtggacggaaactccattttcagacaaacagcagtccaaagacactcgcgggaacactccacagagcattctttctctctctctctctctctctctctcacacacacacacacacacacacacacacacacacaaacacaaaatatgaatcctgcttgttcctacagtcacagaggaaaggcctgagttaaggagcatgaggtcgaatcctcggaacagctttgcctcagtcctggagaaaatgtcagcctagacaataggctggtctggtctcaactaagtaagttaaaaagcaagttttaaaaagtaccaagtttccgagtaattatactaaatccaagaataaaagaccaaatagacagagaagtgcaagtatattctaaatccaacaaggaaaaactcaaaatgtctagcacctatcagatttccttgcaagaaccaagaaaatacatgctataaaaagcagaaaagttcatcagtccaaagtctccctgaaattgcacagatgatagactttgtaggaagaatacaaaagcgatacttataactatcttccacttgctcaagagggtacgggattgattgaacatgttaagtggagacacggtagacataaaaagatcaaagttgaacttacagaaattacctctaaaatgtccgcgataaaaataaatacataaataaataagggccaggcatggtggctaatgcctgtaatctcagcattttgggaaatcatggtagaaggattatttgagcccaggagtttgagaacagcctgggtgacacagggagaccctgtctctacaaaaaaataacaaaatcagatagatgcatggtgcacacccatggtcctagctacttaggaagtggtggaagaattgcttgagctctgtaggtcaggatggcagtgacctgtgatcatgccgctgaactttggcttgggtgatagaatgacaccgtctcaaaaaaaaaatgtctgagaataattgtagattagctcccgcaaaataatagattactgaacctgaagatataacaatgaagctcttcaaaatgaaacaccaaaaaagagaagataaaaaattacactgagcatcaatgagttttacgacatcttcaaggagccttaattgtataattaaatgaactaaaggagacaagattggtggagggagagggagggtacaaaaaccacttaaagaaataaggaaaaacgtgcaaaatttggtgaaaactataaacttatgatttcacatagtttaacacaacccagacacccacacacaaacacaaacacacagacatcatatacacaaaaaaacacacacataaagaaaacatcaacacccgccataatcaaattgcaaaaaaaaaaaaaacaaaaacaaaaacaaaaaaaaactgtgatggagaaatgctcttaaaagcagccagagagaaaagacatgtttgatgcaggtgaacaccataatgatgagagtagctttcccattagaaacaatacaagcaagaaggcagtggaggtacattcataaaactttttaaaacttactacgcacagcattgtacatattcagtgtaatccctatcaaaacaccgatgtcattcttcacagaaatagaaaaaaaaaatcaatcttgaaatttatatggaattacaaaagacactgaatagccaaagcaatagtgagcaaaaagaataaagctgcaggtgtcacaccacttgttttcaaaatatgctacaaggatatagtaacccaaattatactatactgttttatagtataaaacagacacagaccagtgtaacagaataggaaacacagaaataatccacatatttacagacaactggtttttgtcaaaggcaccaataacatacattggttaaaagacagccttcttggtgctgctgagaaaactggacattcacaggcacaagaattaaaatagacctcgatctctcaccacatacaaaagtgaattcaaactggattaaagacttaaatgtaaaacttgacactactaaactactagaagaaaacacagggaaaatagggaaaatgcttccggacttatgtgtagacaaagattttatacctaagctttcaaaagcacaggcgacaaaaacaaacatagaccaatggagctacattaaactaaaagtttctgctcagcaaagaaaacaataagcaaagtaaagagacaacttgtagaacaggagaaaatatttacaaactgttcatctggcaatggattcacatacagaataagacaataagacaagaaagcaaaacaattcaacagcaaaaaaaaaaaatgccaaataataccattaaaaagaggtcaaagaatttgaatagacatccctcaaaagaaacatacaaatggccaaagggtgtattttttaaaatgctcaacatcactaatcatcagggcaatgcgaatcaaaatcacagtgagacatcatctcaccccagctagagtgactaatatcaaaaagacaaaacataacacattctggcaagaacgcagtgtaaaggaactcttatacactgttatatactgttggtgagaaggtaaattttaaattaatacggccattatgaaaaacatgatagtgtttcagaaacactaaaaatagactatcatcatacaatgcaataatcccactactgggtatttaatcacaggaaaaaacgtcagtatatctaaggaattcctgcactcccacgtttactgcagcactattcataatagcaaagctatagaatcaacctgttttcatcaacagatgaatgcataaggaaaatgtggcatgcatacacgatgaaatactttccagtcataaacaaaagaatgaaatcttatcctctgcagcaacatgatggaactggaggtcattatgttaagtgaaattagccaagcacagaaaaacaaatgtcacatgttctctctcatgtgggagctaaaaaaagctgatctcatggaggtatagtgtagattaatagttaccagagaggctgggaagggttaggggttgtggggatgaggggtagttggtcaatgggcacaaacatacggttacataaaagcaataaggtctattgttgtatatcacacagcagagtgaacatagttaacataatttattgtacatttcaaaatacatagaagatttgaaatattcccaacatatagaaatgacaaatgctcaaggtgatggatatcctaaacactaattcgatccttacatactgtattcatgcatcaaaatagcacgtataccccataaacatatacaattataatgtatcagtaaaacatgttctttaaattaaaaaaaactgtcaattctgaattctttactcagtgaaaatatctttcagaagggaaggcaaaataaaatggttttaaccataaatatacttgcactattcatgacctgcagacacacactatagaaaataataaagaacacttctcagatagaaaatcatactaaagatgtgactctgaataaagaaaacaaaaacatcaaatatagtaactacataaaaacatatagaaatggtaaataaacatagatataaacgacttaaattacattacaaaacaactagacttaatagacaactatagaacagtccatccaacacagcagaatacataataatctcaagtgcatatggaacactctccagggtagaacctgcaaaaaaaaaatgagtaccttaaaaaaatagaaaatctataaagtatattctttgtgttacttcactcttgtattgctataaagaagtacctgagcttgggtaatccataaagaaaagaggtttaattggctcatggttatgcaggctctacaggaaatctggtgccagtatctgctgctggtgagggactcaagaagcttacaattatggtggaatgtgaatgaggagcaggcatgtcacatggtgagagtaggagagagagaggtggaaagtgccacactcttttaaacaaccagtctcacatgaactgggagcaacaactcattgtcatgagggcagcaccaatttattcacgaaggatccacgtggccccatgacccaaacacctcccactaggcccacctcaacactggcagctacatttcaacataagatttggatgggacaaatattaaaagtatataattccacccctggcccaccaaatctcatgcctttctcacattgcaaaatgcaataatcccttctcaataatcccccaaagttctaagtcgttccagcatcaagtttaacatcctaagtctcatctgagactaacctcctgtcacctatgagcctgtagaatctaaacaagttatttacacctaagatgcaatggtggtacaggccttgggtaaacattaccattccaaaagggagaaaacaaccaaaagaacaggccccacacaagtcctaaacccaatggtgcagtaattaaatttcaaacttccacagatctctagggcatgaaaagaattcagccaagctttttactaaggcatcacaagggtgaactttgctccagttcccaataactatctcattccatctgagacctcagcagcctggacttcactgtccgtatctctatcagcatcttggtcacaaccagctgaccagtccccaggaagctccaaactttccctcatctgtctgtcttcttctgagccctctaagctcttcaaacctgtactttttacccagttccaaagctgctttcacatttgcattatccttacatcaacaatctacttttggtaccaattttctgtgttctttcattcttgcatttttatagcacctttatagcaccgctataaagatgtacctgaggctgggtaatgtataaggaaaagaggtttaattggatcactgttctgcaggctgtataggaagtatggtgccagcatctgcttctggtcaggcccttaggaagcttacaaaaatggtggaaggtaaagtgaaaccaggcatgtcacatggcaagagaaacaaaaagaagaaagagagaaaggaaaggaaaggaagagagggaaggagggaagaaagaaagaaggaaagaagcaaaaaaggaaaggaaagaaacaaaacaaaaggaagaggaaggaaggaagagagagagagaggaagaaagaaagagagagagagagaagagatgagacgagacggggggggagagaggcagggaaggagagagggagggaggaggaaggagggagagagagagagtgaaagaagaaagagagaaagaaagaaagagagaaagaaaaaaagaaagaaagagaaagagagagaagagtggggaagtgccacactcttttaaacaaccagatcttgtttaaactagtggttagaattcattcgttattatgaggacagcagcaagccaatcatgaagggtcagccctcatgacccaaacacctcctactaggcccacctcctacagtggagttcatcttccagcatgagatatggaaggaataaacaatgatatcatcctctgaacactgatattgaaaaataaaaggtattatatgagaacactgtgaaaagctgcataccaaaaattagatgaaaagaaaaaatccctaaaaacataaaaactactaaactggctcaaggaggtatagaaagtctgattaacactataacaagagtttaaattagtcattgaaacctcccacaaagaacggcccaggcatgaagggtttcattgatgaatattatgaactgtttaaggaattaataataattattcataaacccttccaaaaatataagaaaggggaacatgagcagctcattctatgaggccagaagtatgctgatacaaaaacaaaagacatgaaaagtgaactggagcacaacagcctctatgaaaacagatgcaaaacaaccacacttcaacaaaatactagcaaaatataaaaaggattaaacaccataactaactagtattcatccccaatattcaagggattcttaacctatggaaattaattattttaatgctccctattaaagaataaaaccacatggttatttcaacagtcacatcaaatgttttcatgtacgcagacaggacttcctgttgttttcccattcctgttaaagcatcataaaaggcacgatttgtggtgctactggatggggtgctacttcatgcaaactggatatgtcatgtccaaccatgaatatacttagccataaatgctaaaagattgtaatttggtgtcagagacttggtggtcagtgaccacttccttggcaagtggtaagtacagacatctgaaaggataactaggatttaggtaggtattggataaggaggtgagttacacacagaaaaagtttcacttaaaaactcatagacgcttgaacacagaagatggctcaataggtctgagaaataaacaaagtccagaataactggagctgaatggaaacaaggcaaatgacatgaaccatctgtttctctctcgacaactcactggggcattgtctcctccctataccacccacgtggattgtaaaaacatctgttcttaaaactttcttgtgcatcatgacagcatgtagcacctgaatccagctcagttaaatgagggcaggacagtcaaccacaaaacccaggtggcccaggaagcacatcagggagacaagaccttgctgtcaaaagcagaggaagtgagattttccattgtggctaagcccagagcatatgaaatttcaatgggtacacaaaaaccatatagggtttggttaagctgcagatgcagtctttgcaggtttgaatggggccccagattctccatggcaaatagcctccagttgaggttgattgatgctggtcctccaaggaacacactttgggtggcttagctcctatgcaccctcctcactcatgcacagctgaaactcacctacataacgcaccttctgagaagcataagtgacctatttctcctccactaatgtgtctcagtcccttttactaaaaaggaatatctgaagttgggtaatttgtaaagaagcaaaggtttatttgggtcatgcttctgatgtctgtaaagttcaacagtgggcatctgcatccagtgaagacctcaaactgcttccactcctgacagaaggtgaagatgagccggtgtgtgcagaaatcaattggaaacagaaagcaagttctttcctaaaaatactgcaggagtttaatgatcatatttacaaagtgtttaacacagagcctgacacaccctagctgctcatgagttggcagcaattattgctgatgtcattcatgaaaattggacctcagatggagaaactgcagtgcagagagtttgagaagtttagggacaagaaagacttagtgacttaaaatcgagttctaggaactgaggagagcatccctgggcattttactgccatcttttccaatgtctcagaaactgtttcaatgtgacgtcaaccagagaggaaagcagaggggtttgcagaaccaggggctacaacttcatccacgggagagtgatgtagtaagcgggtgggaaggggcagctgagctcatctgaagggtgtttaaggttttctggcccagggatctttggccatctctccctgcccagggcctcattcttccactgaccggcaggagctggagagtggcttctgagtctggttagagatcccagcagcacccagagggggaagacattggagagacgggtctaaggtcactggagacactgtttgctgcctagagggctgcgacaggctccttgaaaacaaaattcagacactttaggggaagaaaacacaggatgggaaggctcctcaccaggggattgtggataacagagaccaaagcatctacaaggagcccagccctactggaggtgccctgaacacagagatcctaggggtgtctgtattattttgccagggctgccatagcaaagtagcacagccctatggctcaaagaacacaaatgtattttctcactattctgcagatgatgttagaatctaagatgaaggtatctacagggttggctccttctgagcactggagaatctgttccatgcctctcccagcttctgctggctgcggaggtgtttgctgttccctgccatggagggaaatcaccccaatctctgcctcacattcaaatggagtattcctcatgtgcgtgtctgtgtcacagtttcccctttttataaggacatgagtcgtgttggattgggtacgtactctgctgcagtatgaccttttcttaactaatttcaactgtaatcaccctatttaaatataaaatcccactctgaggtccttgcagtgaggacttcattatacaaatttgaggggactgaaattcaaattcctaacagtgtgtctgccatgactcaggcctctccttggggctctgcaggtgggatgtgcaccaccaacctctcaggtggggcattacctgacagcccagaaggaccccaggccctctgaaaaatgacgtctctttcatccaccttgagggacatgttttctggctgtccttctcatcctttgcatgctgacatgggagacatcatcctctgctttttaaagaaggactccttcaccttcccaatcaccccaagtagatgcccatgctggttccacagaatcaaaccacggtgggttacgagttatattagccaccagctgacaatattccctgaatgtccaggatccacccatgctctctgaccatcaccagagtgagcaaatctctgatatgtgggtaagagtttctcccatgggctcccagccgggctgtaagtgaggcaagaccccttcttcagtgcacggggctcagtgcagctgcctccctgaccaagtcttcctgggacactaagcttatcagtttctctcccccagggacagtttttggttgtcctaagcctagctcagctctgctatgaactttgcatcctaagagcccattaaacacccccttgtgcctcaatggaataacctggagtaaatagtgtgaggtgcccctgctttctgctcccagggcctcttctcctcggtggcaccagcactgccctattgaccagcaatcctcacctgcccattcaggcctctacactgcctaccgtgaacagtcacagatcacaaactgattgccaaatttgtgcagatcatcttgacagtttctgtggaactgggtgccttctcatagaaccaggaagtcacaagccaggccagctctagagaagcaactgggggagtaacatgcatcacagcgcctggacacaacaaagggattttgctgtagtcctactaggacacatcctagtgatgtctctgagaaccagtcttggtccctgcaacagaaagcctactaaacaggacagtaggctgcaaggttgggcacaatttgtgccgtgtgtgagccatgtagattgtgcatgtgtgtatgtgtgtacatatgtgtacatgtgcatttagtgttgcaaggaagggttgtgtcaaatgtcccaactcaaaacttttctgttttcctaagttatctgcttctatctttactacctttgtactatcataagaataaggataatgattagggttgaaataggagaaggaataatgtttaattattcattcttatgtgtttaatacatatcaagcactcttcaaaacaattcatatttattaaatcactcaatacgaactactccatgagccaaatattgtcattatctctccatttccagttggagaatctgtgatacagattttgacacatgggaaagctaaggcaaagaaaggaaaaggactttgcccgatgtcagaactagaaagtgcctgacccaggagcagaacctgagtcttccagtcccagagaccctgttctttaacaacagcctgtgggcctgtcactgtgctttaaggtaaagcactgacatctccctaagactccagaaagttctctgtactttttgaatcaagtaactcatacttgcagtgatttccaatgcagtaggaattctctggtgctgaggagtctactaggaatataatttcaatgcctttaaaatttttcagtagccacattttaaaagtaataaagaacgggtggaagcaactttcgtactatattttctttaactgagcttacccaaatattatttcaatatgtaatcaacataaaaatattgagatattttatgttattttcctacaacctttttgaaatccggtgtgttttacccccacatcacatcttaacttgaactacccacattttaaggactcagaagctccctgggactcatggttgctatactggacagagcagatccacatgaatgatgatccatttggatcacagcccctgcagtacttacttagaaccatcttggggcaatggagagtcctatgacccagagggcctccttagggaagaatggctgttccattttccaaccaaagtagaaatatggcgggctctcagaaaccagggaatttttacaatgtgtttcacacttcttcccttctcaaagacattgactataacttccagttcgaagataaatctgagccatcaaaggcatttttttctattggtcagtggaatgaatggcaatggtccctgtggattgtgctccaaggatccctttctgtgggaagattcttacaataaaaccaactaaaagtaggaagttattgtttatatgtagatctagatgaaagggggctgatcatgaggaatatagtattgaaggtgagtgtgttgctattcttcacaaagggctatttttgcctaactcacaagcatcaatcatttttatgaaggtgtattttcccagagtggtcttagcaagttacatccaacgctgtatcaggacccacaagcaagggtgtcagaactgacctgcctgagcggtcagcaggaaccaatgtggagactctgaggtctccacaccaccaaccatgtccaacctccagtcaagtgacaggaggagtggaagcattggttgggaagggcttggaggagctgcagtgacatgctcagccaagtacaggagcaggcatattggtgtcatgtgacctcatcttatctcagttatctcttttcaccaaactccaaggtgcaatgtgtggaggcatctgtctgtacccatggacaccttgggcttcacacattatttctatttctaatgaaccagtgttttgttaatgaattcatttcatcacatccttagtacttctaggttggaaaagcaatacatgtctctaagatattaggtaggaaatattctcccgccactcgtatttattaaagttaaaatgcttcagtatctaatgtgacagttgtccaaattcaatacccttcaccttgttagaaatggaatcctgatcctaacttgtctggagaggaggctggcatgaggagcatgaccacacatctggatgtccccagtgtcactgctaacacacgctcttttgttacttgccgtgaagggagcagagggagcatccacacctttgtccaaaggacttggaggacagtgcacctgattaaaaaatgcagggctgtgataagtgggttccgggtcctggatgagggaagagaagatgaggaggcatggggtaggaggcagggcagggaggagctgtaaggtcaggctctgagtatgggtgaaatcctgactccactcactactctctgggaggatttgataaatcttgtaacctcctgatgttggttctcccatcaataaactaaaggagaggtcgtgtcttaagcgtatgcttgctgtggggctactgtgaatgtgtggttgaggtggtgcctgcaaaacactctccaaagggcctggcacgtattaatgtctcaaaggagtcattctgcttaagctcgtggaggatgactttcctcctgtgtgcactagagggccttgttttgaggaccccagtgacttccctggtagggctcaagcacaaagggcatgactgatgcttcctctgaggccccttctattgggtaaaattcatgctccactcatgacacccacctggcccttcttctgaccttgagaaattgccaatatgaagccctcagactcagagctcagacagtacctcagacagacatgctgtaaagtggagagcagatttgcattcaaagctcctcccttcttgagcttcaagaagaggataagacaggagctcatagtgtccaggttccactgggcagtctcgaatagagctcttggaagtccctccaaccatggcctgggtctccttctacctactgcccttcattttctccacaggtcagaacatcccagggaattcagggaaatgttttcactgctattttcccatgagcaccagtcctcaggggcattctttccagttcttctgtgcattcagcatcattcatgacattctgtttacaggtctctgtgctctgcctgtgctgactcagcccccgtctgcatctgccttgctgggagcctcgatcaagctcacctgcaccctaagcagtgagcacagcacctacaccatcgaatggtatcaacagagaccagggaggtccccccagtatataatgaaggttaagagtgatggcagccacagcaagggggacgggatccccgatcgcttcatgggctccagttctggggctgaccgctacctcaccttctccaacctccagtctgacgatgaggctgagtatcactgtggagagagccacacgattgatggccaagtcggttgagccacagtgacacagatgaaggggaagtgaggccaaaacctcccacctcccctttctcctcagggactcagagtcaacagccctgggttcctctccagtaccctgagacctctgactctcctccctccaagacacccctaggcagaagcagatgcaggccatgactgaggccattttgaaaactcatctttctgtttcctccacaacagcctgtggggaccatgctgggagagaccagagcagcccaggcaggaaaaggaccttgagagagtggctaggatgagatgaccgtgtcccagtgtctcattgtgccctgtgctctattaccaggctctgccccaggaaaggacatggatcttgacctgtcagccatcatttatgagagttcaatttttacattttttaaaatataaaaactacaatctccaagatgctaggagcaatttcactgagtctcatcatggaattctgacctcccccagcatgtcccctgttcctacaatctcctgttcaagaccaactcaactccattacccagaccagctgctggatgatcaagacagggctgtgagagcctaagaatctttaaggtccacgatgagaacacgtcaagaaggatttatgttggaacttccttccccatggatattcacatcaacagagaagatatctgagttcttgcctacacctatgaatacctaagacatgaagtgtgtgtgtgcatatggtgtgggcagcacttcctcactcaacaccagagagtgtctgaggacactgggtacagacatggagacagggcatatttttatacactcaattaagccctcgtccttctctgctcaccaaggagccacccaacaaggccacagcaggaagagaagttgatttccatgaagagccttccctttctaagagtcctggaaacccactgtctagttgtggaatcagaggcagagctctggggcatctccaccatggcctggaccctcccctgctcaccctcccgactctctgcataggtgcttcctcccagggaataagccccatggaaccaggggtcagcctggccctgaccttgagctcagtgcagggagtgatgcagggtgtggggctatgggaatgagaccctaattctcagtctcacgtctcctgtctcctcttgcaggctgtgtggcctcctctgagctgactcagctgcctgcagtgtctgtggctttgggacgtacggccaggatcatctgccagggagatagcataggtgactctgatacaaactcgtaccagcagaagccaggtcaggtccctgtgctggtaatttatggtgacagcaaccagccctcagtgattcctgagcaattttctgactgcatatcagaggacatggccaccttgattattaatggggcacaggatggaaacaaggctattactgtcgctcggaacagcactgcttctcatctcacagtgacacagcatacagtgaagtgagatgcaaaccccttcccatctatgtcattctctcccttcaaccccaagaggactgtggtcacagccatcagcaggtctggcccagttcattcagatttgagacccccaggctgcccttccctccagtcctccaggcaggttcattagatggtaaatcaggggtggatacacaactattaaatatcatcatgttccaatttttcatgaagtagaggaatgattgaacatgttaagtagaagcacagaataaccaaaaaaggactaattgagcttgtgtacagctaataattgcaatgtctgtcaactttaaaaacatactggatgtgattaacaacagattagattatgtaaaacaaaagattagcaaacttgatcatgtagcactagaaaatattcaaaatgcagcacataaagaaaaaacaatgacaaaaatgaaaaagcattatcggatattcataaagaaaatgaaggtgagttataggacaacttcaaacagcctgaggttgactaggagtaatggttcacgcctataatcccagcactttgggaggtctaggagggaggatcttttaagactaggaattcaagaccagactaggcaacatagctctataatttaaaaaaaaaaaaaaaacttaaaaattaactgggcttcgtggcttgcacctgtagtcgtacctacttataaacctgaggcagtaagattggtagagcccagaaattcaagactgcagtgagtgagctatgatcatgccactggactgcagcctgggcaacagagcaagttcctgtctctaatatagggtctcaatctgtcattcaggctggagtgcagtggtgcaatcatggatcactgcagcactgacttcccaggcccaagtgatcctcccagctcagcctcccaagtagctgcgaatactggcgtgcaccaccatgcccagctaatttttgttttttctggagagactgggtctccttatgttacctaggcttgtctcgaactcctggactcaagcaatcctccagcctcagcctcccaaagtgttgagattacaggggtgagccgctgcacctggcctaaaaaaaaattttttttaatacaacaacctaagtatgtataattgacatccatggaatgtaaaaggtatgggtgggtagaaaagaatatttgaataaataatagtcaaatgtgctccacatttggtaaaaaccaaaaactggtatatccaagaagttcaacaaaactgaagcacaggaatcatgaagcaaatgactccaaatgacataatagtcaaattagtaaaatctggtgatgaagagccacttaaaagtatgattctaagagtacatttctcattagaagcaatgtaagcaagaagacagtggagcaataattttaaaatactgaaagaaaacagctgtcaaccttaaattctttatccaacaataataactttcaaaagtggaggataaatataatgttttcagacatataaaaacttacagaattgattactatcactcttgtcattagaaatgacaaaagacacccctagacagggggaaaatcataccaaattgaaatatgaattcacacaaatatcagataatgcaactccatttgaatatataatcacatttgaagacagattttaataagtgatatatgtatcacaaagcctaaagtaaacattaaacttttttataaaagaattatgactagtaagctgtattaggattctccacagaaacaacataaatcagatatgcatgtatgttatacgtgtgtgtatatatatacatatgtgtatagtatatatatgtgtgtatatatatacatgtgtatagtatacatatgtgtgtatatatacatgtgtatagtatacatatgtgtgtatatatacatatgtgtatagtatatatatgtgtgtatatatacatatgtgtatagtatatatatgtgtgtatatatacatatgtgtatagtatatatatgtgtgtatatatacatatgtgtatagtatatatatgtgtgtatatggtgagagaaaaagaacaagagagaaactaattttgaggaattggatcatatatttgtggtagctgacaaggatgaaatatgttggtcaggctgaaggctggaaattcaagtaagagttgatgttgcagtcctgcatccaaatttagcaaggcagcacttcaggaaacctccacatttgttctaaaaacattcagctcactaaagagtcccacccacattgtgaagagaaatctgcttatacaaagtttactaattaaaatgttcatcacatctgaaagttatcttcatgtcaactcctatactggtatttgataaaatcaatctggtgcatagcctacccaatctaacacttaaaattaactatcacttaacccagcaaggaaataaaaagataatttaaaaaatcaatcaaaaaaggagacagcaaaagggaaagaaaactaacgaacatatgggacaaatataaaataaagagcaagaagatccttccagctcagcctactgagtttctgggactacaggaaggtttgtagttctccttgaagaggtccttcacatcccttgtaagttagattcctaggtattttattctctttgaagcagttgtgaatgagagttcactcatgatttggctctttgtctgtctgttgttggtgtataagaatgcttgtgatttttgtacattgatgttgtatcctgagattttgctgaagttgcttatcagcttaaggagattttgggctgagacaatggggttttctagatatacaatcatgttgtctgcaaacagggacaatttgacttcctctttttctaactgaataccctttatttctttctcctgcctgattgccctggccagaacttccaacactatattgaataggagtggtgagagagggcatccctgtcttgtgtcagttttcaaagggaatgcttccagtttttgcccattcagtatgatattggctgtgggtttgtcgtagatagctcttattattttgagatacgtcccatcaatacctaatttattgagagtttttagcatgaagtgttgttgaattttgtcaaaggccttttctgcatctattgcgataatcatgtggtttttgtctttggttctgtttatatgctggccacttctcaaaagaagacatttatgcagccaaaaaacacatgaaaaaatgctcaccatcactggccatcagagaaatgcaaatcaaagccacaatgagataccatctcacaccagttagaatggcgatcattaaaaagtcaggaaacaacaggtgctggacaggatgtggagaaataggaacacttttacactgttggtgggactgtaaactagttcaaccattgtggaagtcagtgtggcgattcctcagggatctagaactaaaaataccatttgacccagccatcccattactgggtatatacccaaacgactataaatcatgctgctgtaaagacacatgcacatgtatgtttattgtggcattattcacaatagcaaagacttggaaccaacccaaatgtccaacaatgatagactggattaagaaaatgtggcacatatacaccatggaatactatgcagccataaaaaatgatgagttcatgtcctttgtagggacatggatgaaattggaaatcatcattctcagtaaactatcgcaagaacaaaaaaccaaacaccgcatattctcactcataggtgggaattgaacaatgagaacacatggacacaggaaggggaacatcacactctggggactgttgtggggtggggggaggggcgagggatagcattgggagatatatctaatgctagatgacgagttagtgggtgcagcgcaccagcatggcacatgtatacatatgtaactaacctgcacattgtgcacatgtaccctaaaacttaaagtataataataataaattaaaaaaaaaaaagaaaagaaaatgtctctagacagcttggttcctgagctgggaatcaaccgtcttttctctccctttcaacccagagtgtggcaggcgcgccccctacaggcagctaaaagagctgactgagatgccgtctccatagggagggatttgggctgagaatttgggctgaggattttcccatgccctccctggcaggctggtcccaggacactcagaagacttactgttacaggtccagagcatttctcgtcttccttttctctctccttgccaagtgaccttggaattgttcctccccatctcagccccttcccttttgtgttaagtgcagtttgcagattttgtgttcctaggtcctgtatctgtagaattttagggaaagcagtgctggtcacccacatggaattcaagacagcgagcccaggaccagaaacacagacagcagtgggggtccccacagagcagcatggtgggcaccaggtggaggtaagaaaccaggaaccactcccctgagtgtcttcagccccaggtgaactagggaggggtcagtgggctgggctcaacccaccggggactctcctgtcactgccccagcagcaccatcctggaagcccctatatgtgctaagcagctgccaaagaacttgattaattacctgtaaatttcccttcaccacacctgaccacacatgactcctgcccccaaattactaatttattaaaatggcacaattagccgaaatggcctgaatccaggacccctttcaggtttgccgctgacctctcaggtcctcacacatgccagactctttccacaggggcctgactccactgtttccaacacaaatcccaggactcatttttctctgtcagtcctgacagcagttccagagacacttccccattaagatgtccccaggctcttataatacaacctgtctgttattttctgcctaaatctttttaattatccccatagcatttacaactgtaggaatctttgcctattgttaattttattaattgattggtgttaaatatttacttaattggtcatggatgcttttttaccacagaatcacacataaaaaacagacacaaacagctaagggtgtatttctcgctgcaataatacccaccactttcacgaagacaccagggtctttctcactttttgtcccaccatccctatgatattggctttattttcatccctgctgatgtgtgacctcagggtggctgctgcagctccagctatcactcccatattcaaggagaaaagggcctcatgaatctagtgctctttcacaagagcaaagctttcctaagaagaatttcacccactgatctcacaccccactgatcaggcctgagtcacatggtcaatcccagctgagcaggacctgggaatcacaggcaccagtcttttcggtgaatatagaagacagtgctcaggtggaaggtgacagggactgtctgctgggtctgcaaacccagttttcccgcacagccaaaccagcacgatgaacaactcacttcaagaaggctgtgtcttgttcctgctgaattcaccgcatggaacgtgtcccagaccacagtgggtctggattaacatttgatgggtggatgttcttctgtctctgactttggtgcaggagtcaccactgtacgctggtcctgcatccacagcggggaccagtaagagccagtccctgagtcctgtgatccccgccctgcatgccaagccctggtattacccccatgaccacccaccgcccagacacatgtgcaggcagcctcagatggaccttcctcctcctcttccaaatattcatgttcatattgtcatgagtaatctgcacccctcgcacctggtattgaggcaggcatgagtcacaaagagaagagaaaaatttcctccattggcaccagcagtctgcagaccagggaatcagggacctgaacagaagattttaattatacacccggacccaggaggcccttgagcctccagcagccagtatggagcagccaccaggggacagaacagagtcacctggcaaagtcacttggagatagggtagacctgggtgacaaggagatgctgacatgcagggagggtcagtgaccacaacctgagatctagaaaggtgtcgtttttctacagcatcatccttaacatcgagtacaaattctccaggctttgtgtttctcagctttgtctctggccaatgttgcatatttgacacaggtgcagacactttgcttccccctacacactggcccactcttctgtgctaaaacgctgtcattgccacaaacgccatcctcccctgtgggcacatgtgtttcatcaccctcctgtttgctctgagagccccctcattctgctacacagcaaagttttctttcagcatctaagctgtacctgaccatgaccacatactgggggtacataggcacagcacctgtgccctaccctaggagctcacagccaaggccaggaacttacagcatctcctgagtctttcaacactccgtgtgcacatgacaagggtgaagtttgattgtggaaagcaccactcagaagcaatggcaggtccctgcatgtgtgccagccttacggtgtcacctgtagagtggggtcatgagggtcactgcactgggttgaaaagtgccctccagagggggagctagaaccacacctaacttctggattttgccacaaaatatttagggacaggacacccctggagtcctcaattacccaagttattctgagccagtattcaacagaggaagtaccttagatctcagaataatccctcagtcgccattgtaagtcagtccctggccatctccacgcaggacaaggaatggccacatgggcaggacatcatactacctggaaaacgcacaaagaattcctctcagagttctgcatggccagatcagctcaggagtgaggccataacacaacctacagtgacgatgtcaacccagatgatgggaccagaaggagaatgagaattctgtgtgctgagggtgggtctttaggggccccctctctctctgtcccttggggctgagcccttctctggaaaccacacagctcctcctgcagcagcccctgactgctgatttgcatcacgggccgctctttccagcaaggggataagagaggcctggaagaacctgcccagcctgggcctcaggaagcagcatcggaggtgcctcagccatggcatggatccctctcttcctcggcgtccttgcttactgcacaggtgctgcccctagggtcctagccactggtccagtcccagggctctgggtccagcctggccctgactctgagctcagcagggcccccgcctgtggtgggcaggatgctcatgaccctgctgcaggtggatgggctcggcggggctgaaatccccccacacagtgctcatgtgctcacactgccttagggctctttcatccctggatctgtgtccaggccaggcacgtgggaagatttacttggagttcagctcctcagtttcaagccttttctctcccgttttctctcctgtaggatccgtggcctcctatgagctgactcagccaccctcagtgtccgtgtccccaggacagacagccagcatcacctgctctggagataaattgggggataaatatgcttgctggtatcagcagaagccaggccagtcccctgtgctggtcatctatcaagatagcaagcggccctcagggatccctgagcgattctctggctccaactctgggaacacagccactctgaccatcagcgggacccaggctatggatgaggctgactattactgtcaggcgtgggacagcagcactgcacacagtgacacaggcagatgcggaagtgagacagaaaccagccacctcggcctggctcacaagacccttccctctctcctgccctgtcacactgagcaggagggagccttccatgtggaatggaagtttccagtcctatccctgcccttatgttcctgagagacgggagcaagttcctgcccacctctaggctcagcttatcccagaataaactgagctagtcattttgatgatcaaatgccagctcccaaaagaccccagaaaccctgatatctaagtagcaccgactctattagtatcaagggagactagccctagggtggaatcattttagtgtctcagaaggcacagggcaatggaaagtgtttatgaggtttcaggatatgcacgtgagcagttaaaggcaggtcttacaaggaaggaacctactagaattggggcccatctgtgacatcatagcacagcctggtggacacagagaagggaaggtcctgaatcaagtcttgatcagtaaatatttattggataagtgagcaatttacataggtgagaactgtgtgctctcttgagcagaacacttacctggataattggttttcaggaattccctgaagcaatgagtgacattctttattgttttcaccctcatccacctgggaaagagtatcctggaaccagcagttaacattgacacagctggtctcggtcctcagcacaaacattcattgcaggctgaaaagtgacaacggaagagaaaggagtttattaaatccctagacacaaacaaatccataagcagagatgagagatgcgggctcagctggcccagtcccacaggggtcattcctcttgtgatggaaatgaccacatgagggtcccccaagcggtgttggggggcagtcatggggaactggcctcccagggctacctgctgcttgggctgggcagaggttagagggatggaagtctggtccagtccttcccagcagcatctccaggctcctcctccctctactggggcttcccctccactccccagaaccatcattgcttcctcatctcctgtctcctccctgccccaaggccctccctgtgctcaccctggctcctccccctgctccatgcccagcctctgcagagcagcccaggcccagagacttgggcagaagcttccgtcccaccagctgcagaaccttccctacagaaccaggccagtccctgtgtctcatatttgtagagatcccaatcaccctcagagatgacgggtgggaaaccagcccacagtgacctaggctgttgggcatatggccttcaagctggccttcaagcccacttggctgcatctccttggccaactccaacatccaggctgggagtctggaatcctagttcccctggcccattcactcccactagggttgcttctaaactccctgggcctcagcttcctagtctgcccactggaagcagcgacaggcattttccagggctgcggtaagggccctggaacaccctctctcaccctctctctccctttctctctctctctctctctctctctctctccccctccccctccccctccctctccctctctctctctgcctctgtttcctcctcagtagtgggaagaccccctgtcaggtgggccagtccatgacatctacagagggagcaggaacctctcctatttcctggaggagagctggggtggaggctgcaacccaggatcatcagaggagctggggtcttcaaggttcctagggaccccttaagcgggggtcagagtggcttcagcggtcttattgctcggtccagacagaagatgtttccagttgtgaaaaacgacttcagggacaacaaaaacagagattcgcctctccagacaccagtggttggtgtgcctggagtactcctcgtaccaggcaggggagagagtcctagacagaggaggttctaagtgtcacctagatttcaggcctcggggcctgtattgggtaggtgatgtcacagtgagttgatgctctgtagccccttccctaggaggtggcagagggaagagctggtggtcctctgaggtgtgagtgagtccaaccctgagggtcttcccaagctggaggtccctgggtgtagacggaagaggttctggtcaaagaggcctggtgttgaatcctggtccatttattcatttggtcaagaaatattcatggaggacccaatatgtgccaggtgccaagccaggtgactggggacacagtgttgagtgggacagttggctccttcactgctagaggtattatattctcaagccgagactcggctctacgattgtatgtcagatatatagcctctatgtgcatgtctccagagactggtttcctggagttccaagtgacagccatcactcacctcgaatgcaaaaattaaaggagcatccaaaaacctagtgacccagataaataatacttaatgcaatattttcaaaaatcaaaattaatgcccaacaaacccacaatgaacaaaatttcaggatctgactcactcacctcagtggttttgttcttggtcctacccacagtcccacaggtgagtgagtacccacagggatgcaaaaccagagtcaggcccctgcaccgccttctgcccggccaccagagccctcccctgggtcttggcctttctcttctgaagagctccagccagttcctcctcaggcttcctctactgctggtctcttctgccccctactggattctccccttacagctgcactccaggcagctggtggaggttaaagaacagaaacctcccaaaactccaccctccagttccaggctggctccacctcatgtccaaaaaggctggtcctccaggtctttgattgctattagtaagtcccaagacacagtctttacaccaagtcgctgtgtgccttgggcaagaaactctccctctctgagactgtgtttccacactggtagaagtagctagaagacctccctgccaggttggcaagtccactctgtgacatctacaaagggagcagggatctcttccatttcctggaggagagctggggtggaggctgcaacccaggatcaccagaggagctggggtctttggggttcctgaggactcctcagagggggatcaggagctgcagagccagcttctaactctggggactcagagatccagaacctttgtcatatccccagccaatactttgtcatcctgtgcctcagactcccccagatcccaagagtgagaagctcaagacgagacaagaaagaccagccagcttgaatttagggatggtggggagtggggagctggggacccctggacctgggggagaggagtctgcagtgcctgcaggtggagtttctgggacctgggggatggagactgggcaggggactgaccagcagaaggccaaggtgggggataccctcagacatggagcagggcagaagcaactggatggggtacatccctctgctttgggagagaagggccagggcgggacccagagagctctgcagaggcaccacagaccctcagcagggggtctgccaaacaggacagctggacttggctgcttctgcccaggcctggatccagcccttgcacatctcagggcaggggataggcctgggtggccagagctgcagctgcacctgctggggaggcctagtccagtcctccagggtccccagacagactcggatttccgactgcagccaccatggaaggatgtggtctgcggtgacgatgtctatccagaggccatggcaggtgcaagggtgggggtaggggcagcagctggggatgctacatttagggacagcccctttttatccccaagacctgggactgtccctgaaaggaaccacagcttctgggtcctgagcagtgggtgagtgtcatacccacagaggggctggaagggagcagcttcagcctagactcccagggcagaccctgccccagccccgaatatccaaggagcccaagatcagaggcaggaataggccaagctccccagtggagaagctgtgctggaccaggggtttcccagggccctcccttgtgccctgaatgatgtctgttagggcacctacaccctgttactgctcagtgccttgcctattttgaaggacagggatgtgtggtgattatttgtataatccagcccccagcacctggtcctcaaaagttacccaagcaatgtgtataaagatccagcctggagatctttgaaaaccgattcgatgagtcgaaccattaagtcatgatcaccatcctcaacttcatctctttcttcctcctcctcctcattatcatcaccttcaagaactgttaagagtctgagacttcatcctatttgcagactaaaaagtaagcctgccacagtgccatggatgctggcagaagatacaagactcctgggtcagagacaacgaataatctgtttttcacagcaatagcagttgccaaggtatcagcattgtcttgcaccagttccacaaggtgatgcaaagagggccaggtgacatctgcatgccagagctcagggatcccaaatatttcatacttgacagtaagcatatatctgtgttttgctccaaagagaggcattctctgtaccttccgaggttgttcactccacaaacactcttgaaaagataatccacaatcagtgcctttgcccgagagacatgcagaaatgcagagatccatagtagaccactgtctcccaacaaccatcaactttatcaatgaaatgaagtctcaggctatttgtctgttaccatagcccacaaaaatgtctggcttgattgtcaccaaatgtatcaaggaagttaaggagtatctgacacaaaatgtgaaccaagcaattctcaaaggagcctcccaggaaattcactttaggaagtcctaggaggctcctctgagagttgctaaaacaaaacattgagagtcctagagggctgcagatctgaacttgagcagatatttttaaagattttgtggcagaaaaagaaactggaaagcaagagggcagaccctcattgcagttctgtaatgtaagggggcagagcaggggcctttctcaccagagtatggggtcctgaagatctcctcaaacatttttatactaggctctcagggcaacagaaaagatgggagcgatgaatggggcgtaaaggagtgcaaatgacacaaggggtcacatgaagcaaaagaggtttattcaaccagatttagtccatgtttaattgagccactcctttgtgccaagctctgggttttcccatgcaccaagcagtgtgttaccacctagacccagagagccatgtcatcatcagcaaagcacgccctagtgtcatgcaaggaccaggcctcagattccgactccagacctactgcctcttggccctgtgacattaaaagagtagggaatcagcctgagcagcatttcctcatcttcaaatgtggaggacagtagatgatcttagctcccaggattagtgcttgtaaagcaataataatgtaatgcattattattgtattatgcatcatattcccatattatagtcaaaaaggaccccaacttaaagcacctgccagccctctcctcctccaccactgccgaatggagccaggcacgagtattccaggtggacagacgaatagaaatacaggggacgagccccttcctagatcctagcgcagcttgctccctacttaaggaatgatattggaccctgcattcatcttctctggatggtaattttctcacctgtaaaacagagacactggccccaaggacaccccacaagtagttgtgaatcccaaagtaagagaagaacaaaaaaagaaccagaatttattcaacacccactgagtgcttagcaaacacatggtttctttaactctcataagcttcatgctgcagaggaactctccccattttacagataaggaaactgaggcccagaggtaacctaggtctagatagactccacatttatgacttcaccactcttccttgcctgaaggatatagaatcactccctgcagggctcttgcctgactcaggaaagggccacaggatagccagccaggcttaaccaacccagccaagaaagggctggtcccaactggctggagtgcagtgtacaggcacccagcctggaagactgatcagaaaagaagccacagctccagccccagccccaaccccctgagctcaagcccttggggactcctgctgggcagctctctaggccctagggagatgctccacagacccaggctgccctttgggaagtggggaagacaagtgggtcaggtgtgcaccacccaggggcggggccaggcagccggctgtggtgggaggcagttgagccctggattgtgaccgcttcagggcagttggtagatgcccctctgggagagatccccaggggtgacagccatggaccctggaagggcctgggctagggacagggaccagagccagtccagggagaggacagagccaatggactggggtgtactgtaacagccctgctggcgagagggaccagggcaccgtcctccagggagcccatgctgcaagtcgggccagaggtgcccctgaacctgaaggccaatgagacccaagacaggccaagtgggttgtgagacccctgaggagctgggccctggtcccaggcagcgctggcccctgctgctgctgggtctggccatggtcgcccatggcctgctgcgcccaatggttgcaccgcaaagcggggacccagaccctggagcctcagttggaagcagccgatccagcctgcggagcctgtggggcaggtaaggggcaagagattccaggggatgtgggggtcctgcagcagagctgggaaagggtgaccaaggggagacaagccagaggagtgaggaggaaggttaacccctaagaggggcctgggctgacactggctttagtaatgggttgatattttgtccatcacagatttgtttgaattactgtttttaatatcatattacgatattatttttcttgatttctgagttttctggcgccacttaaattttcaccagggtcagtgcctcaatcacctagtcctagtcctctgggtagggaaggaacagaggcagggacaggacatccacagggggtggtggccactgtccccacagggtgcccaggcctgttcctccccctcctcctctctgcccatgtgcctcctgcccagtgagggcaggggccactccctggagaaggcagcaagggcttggtttggtctcccccaaggctgtctgttcaccaacttgcacataaatgcttactggggccaggctcaaggacacagggagggtgggatgaaccgaggggagctgtccagtcattggaacaggcccacggcccatgtttggagcaataaagggagaggggatctccctctgggatgatgcccaggctggtctcacagatcgaggggcactggctggtgatgggtgcccccaaaagacagagcagcgtcagaggagaggagagcacaggatgaggctgggagctcctgggtgactgggaaggggaggcaagaagaccatagggtccgtgcaccattcccagtccaggacgagtccttggatggatttaggtagattgattatcagagtcagatttgtgtttttggaaaaatcagcaccggattggaggctgatgcgacgcccgattagaggagggaggagagggggtgatggccaagtccagggtaggtggggatcctggaggaagccgtgccttggggatggggaggacactcagattcagagcacccaggggcccagtttcctatgaaatgggagcatgaagttgaagtgagggctgagcagaggggagcagacacgctcggggactgtctatgggcattaaaaatgtataaccattttagcaacaggcggcgagtcaaaaaacaaagtgtgtttatctaaactgggcaattccacttctaggaatttatcctaagggttggttgggggaataatcaaagctgtaaccaaatctttataacaagggtggttagctcagcattattagtgatgggagaaaactggaaaaaatccaaatatctaccagaaagggtgtgaaaaaacacaattgtatttgggggactgttgttgtttttgttttgaaacagtcttgatctgttgctcaggctggagtacagtggcgtggccacagctcactgcagcctcaacctccagggctcaaaagatcctccagcctcagcctcctgagtagctaggactacagatgcaggccactacacctggctaattttgattaggattattattagtttagagacagagcctcgctatattgctcaggcctgtctcaaattcctaagctcaagcaatctttctgcctcagtttcccacgtgctggaattacaggcgtgagccactgcacctgacccaactgtgtttttaaagtatatatgcattttcaaaaacctgtcagaaaatatagaaaaatgtcaatggtgtgtctggctggctgatgggatttcacctaattttaatgtggctttataattttctggttttgtgaagttgttcacaaaaagagacatttcttctaatataatttttaatacaacagtaatgtactcatgtgcattactctttttgtaatgagtatattacaaaatgtaatgacttttgtacattactcttttttcttgccaaaaaaaaaaaagattaagcagagaagtatataaagtaaaagcaagtgcttctgcttaccatctctcacctcttcccagagatagccactgtcaggttggtcaatatacttccagaacttttcctgtgtgtgtgtgtgtccctgaaaacacacacacacacacacacacacacacacacagttggtgctgggattttattttgcaaaagtaagagccatattctgcatattaccaacttttaatctattattgacactttctgtatcagtccatatggattaaccacattcattgcttataaactttgttttataagcaaagtttagatgagccagaatttatttccactaaaaaatctaaatgacaaatgatgctgcagtggaaatttgtgtgtgtgtgtgtgtgtgtgtgtgtgtgtgtgtgtgtgtgtgtgtatgtgtacaaagtgcacttatatatctccccaggatagatgcctaaaagtggaattgctggatcagagagaatgtacttttgaaatcttataggtagtgtttccaaaagtctgtgtccactcactccggtgaatggtagtgccttcgctcctacattcttaccaataatgcaaaattgttgatctttttatattctgcccatctgatgagcaaaaaattgaatgtgtttatggttttattgtgtattttattactggtgaaattattttttatatttttatttattggttttatttcgtctgtgaattaactggtcatcatgttgcccgcctttccattcagttgctttcatctttttatatatcaataacatattgggatatatttgggattttaaccacttgtttagtgtatgtattgtaaatatttttccctggtctgttttacgggtcttttgtttatggggtctcccaccataaaactgtggtaaatttttatgtgtcgaactggtttaatcttttctttatggtttctgtgacctccaccatgtgtaggaagttgtctttatttcaatattataaactcatttttctgttttattctggtacttttggtgtattggtgttttatttttttttctttacttcccctggagtttatttttgtggatgtaggaataagaccttattttccaaataggaaagccaatcatcacacatttgttgaatataaatgcaacttttctcaattactacattactgatttattacattctttctgtggttctcttggtttattgagctattcctgcgcccaccctgttttgattattttagctttatggtatgttcggtaactggtagggaaagaacccgtcattgttactttttctcaaaatagtcatgtctattatctgtcattcttagagttggactgcagaattggttctctaattttcaaaaatcattcttgtgttatgtggtaatatcacagaatatgggattaatttgagaactgctatctttataatgctcagtgtttttgttcagagacatgatgtactctccattcactcagataagtggtttaatattttattcatgcaaatcttgcacactttgttttttattcataaagggtttgtaaatataattttattgaagttataaattttttcacaattttatatcgtaaatgattactgtttctatagcaaggaaccctattaacttttctatgttgctcttgtatccagacactttaactcttgtattaattccagcagttcttcagctgattctccgtgtgtgtgtgtgtgtttgtgtgtttagttaactatcacaccatttgccaagaacaattttctctctttttctgtaatatttatacctccttctctcccccttttatgtcatttcattggctggaatctatacaatatgctgaataataaaagtgagactagacaaccttgccttgtttctgattctttaaatgttttgcctttaaatatgaaggttgctgtaaatttggggagatattcttcactgagttaagaaaattttcttcagtaacttaataaaaggctaaatgtttgctttctttatatgagaaacaagtgttgaatttatattactattatattaaattctgtttcaaaaatcttctgcacatgtcttaaatacaaatgtattaaatacaagctgctgctaagatgaaagttgctggccccatcacaatgggtatcttccaatgtgaataaattgccttggggaataaaatcagatttggaaaaacctgaggatggttgccatcataaactcttagagtgtgacctgggtgtttttctttttctctgtaggatgttaatagtatcttgtgtcatgctaggatgtctaggacagagggcaatacaatgaggggaaggcattctgcgatgtccccaggcctctggcttgaagagtaacttgctgaagtgaggactctgtggaggagcaagttatacagaaagaagtttagttgtgatctgttgagttggaggtgtctacagggcatccaagcagacataggttgaggaggcagaatatatgtgaatctggagccaagaagagaggtaagggctggaaatagggatctaagacccctggacagttgtgagtgtgcacaatgagggtcagatgcagagaaaattaggagactacagagagcagaacccagggtggggatctgggagtcagcagttgggcatgggcctggtagaaagggaagccaaggaggaggagagggggcagtctcagacaccaaggaggggagagtgactagaaagaaaaccttcttgcagagacataggggatggggaagaactgcagactgaactggggcaaaggactgttggccttaaccagagagatttgagggagagatgaggctgagagccaggggatcctgccatgtcccagcataaaaacagtacctgacacagatgggtgcttgggagctgttgtcggatgaatgagtggacagatgcatggatggacggatggatggaaggatgatagattgatggacaaacagatgaacagatgaatagctggatggacaactggatggatgggtagacagaatgatctcagagatcagaaaaagcttcatgcactaagtgggactgaaccgcgtctccatgggtagaaagcagaggaatctccacttgagtcaggaatgacccagtgctctcaatccagggagaaagccagcctggcttcactggggacacttgtgtgggggactcagaggccctttaaatgaggccagacgaggttggacaggtccaagccaactcagcactcctctgccacactgcacaggaggggatgtgtcactcagggagttgctgggacctatgggtcccagtgttgtcatcagcaccgacagcctcagagaggaaagacacacactggggtaactccaaggctgtgtgtggcacttgccttggacagcagacaggcacagggacacctctagggggctggccacccccctgcctcatgtctaggtcccagccccgcccactgcaaccctgtgcccgtcatgcccagcaggctcctgctccagcccagcccccagagagcagaccccaggtgctggccccgggggttttggtctgagcctcagtcactgtgttatgtcttcggaactgggaccaaggtcaccgtcctaggtaagtggctctcaacctttcccagcctgtctcaccctctgctgtccctggaaaatctgttttctctctctggggcttcctcccctctgtcctcccagccttaagcactgacccttacctttctccatggggcctggaggaggtgcattagtctccgggtaaccggcaggaagggcctccacagtgggagcagccggatgcagcctggtcccggggcctgagctgggattgggcagggtcagggctcctcctctcttccagggcagatgtctgagtgagggacagaggctggttctgatgaggggccctgcagtgtccttagggacattgcccagtgactcctggggtcaaggacagaggctgctggggtgggcctgggagctgctgagtctcatagtctaggggagcagccccaagaacagctgagggtctaggctgaggactggatgccaatccagcctgggagggccacacggcctggtgacacagaggtcaccccaaggggagaccaatggagggcacagagagggctctgggtctaggctgcagctctgtggcctgtgctgggtcatgaggacatggggacacagagggacgggtgagactgggtgaggtgccagaatccaaccctcccaggacagtcaccagaaaggagacagtctcttagggcagagatgtgtctgtccctggagccccgtcacctctggggcccagtgtctctctgttcacggatcggcctcctgccttcctcaaagggcatgttagactcaggaaatgaccagaggggagtgaatgaggggtgcagagaactccatggctaccaggtgaagtttggggtcatcacaggctgctggggtgggcctgggggctgctgagtctcatagtctgtgggagcagccccaggaacagctgaggtgaagggttctgtggtcgggcttgtggagacaggaaacatctcagagcctcagaggagccctgaggcttgtctaggtggagcccactccttgccaggagagccaagtgggctgggctggggcagagcccggtgcctgtgagggataggaagctccagttcaaagcaggcttgggtctccccacacactgcctgccaggacagtcctacaggatgagcaggggacccacagttcacggaggaggctctaggtcctggaagaataaagtgggtgatggaggggggtatagggatggaaatgagggatccaggggtcaaggccagattctaaactcagactccagagatcagagaagaaggaacacagcctgccctgggtatatggagaaattgaggctgtagaggagaggggctgggccaggacacctgtgaaaggtgacttgggagggctcctaggaaggcacagagctgtctgctctccacagggcatgagtggaaaggatggggaaagaagaggagagaaccccgggtggaccggatggccacactgtgaaccctcccagagactttagacagagagaggggctccacaacaccccggtattctgtctgccctctctcacccccttccctgtccacacaggtcagcccaaggccaaccccactgtcactctgttcccgccctcctctgaggagctccaagccaacaaggccacactagtgtgtctgatcagtgacttctacccgggagctgtgacagtggcctggaaggcagatggcagccccgtcaaggcgggagtggagaccaccaaaccctccaaacagagcaacaacaagtacgcggccagcagctacctgagcctgacgcccgagcagtggaagtcccacagaagctacagctgccaggtcacgcatgaagggagcaccgtggagaagacagtggcccctacagaatgttcataggttcccaactctaaccccacccacgggagcctggagctgcaggatcccaggggaggggtctctctccccatcccaagtcatccagcccttctccctgcactcatgaaaccccaataaatatcctcattgacaaccagaaatcttgttttatctcattttttttctcacataaattgctagcctccccggggttctcagtgtggggtacagggaattctgcacccagtgtgaaaatcacccaagggaggaggctcacagcctccctgagtcatctccccagagggtccttcctctcccagtcaccccttctccaactctccactgtacccctgagctaccagtctggcatcagttcagaccagtcccacaccctcctaaattttacttctcaataaatacctgatcatgtaaaacgcagcatttctaatgtgcagtctctgtctggtcatgtgtctgggctgaagggtcactgctcagggacagggggcagttccaggtgagatcccatgtctccgtcatcccacaccccacccaacctgccagggaaccgggtgagctccctgtgccagtgggaactgcaatccaaggcacaaaattgtcctgcagtccttgcccacctgggaagggacaggggcccagtgagaggtttgctggcgccctgtggggagattcaggagaaatgaagggggtccccggagaccagatgagggctagaggcagaaataatggaaaaaggacacccttgactcaaggccacggtctcagcaggaacagaaggtgaaattccccattgcatacgaggaaccagtcaggagagtgtttactgggtgagggataaataactgtgctgccactgggaacttgtaaaaacattgggaaaggaaacatgcaagtgtctttctaagacttgtacaatggacattggctaagtaaacatactgacaagtcctgcactagggaaccagtttaatatgatgagccacagcatatccaaaagcatgttgatctccttcttcacctttagaagacccaaaacactctgaaagataccagcgtttcctggaactagtttgtggaatatggggtgaggttgatgcacatgatgttacgggtatatgatcacatggctgtgggttggggatcaggctcaaagttaacactagcgtggggctggatgtcaagcatgaagggtgtggaccactaagtcaggcccaggtagagttaatttctgattggtttgtggctggagcttgatgatggtcagtctgcaggagcaggaggatgtggggaaattgggaaaatgagaaaagtcacaaatccaagctcaaactctgcatctattgattgcctgggggaggctaatcagagttgaattcaggatgagcttcagggctgggtcagactgaataagagctgagtgaatgtgggctgatggctccaggcaagtcctggcctccactaggagtcagatcccacaaaccctcctgcccgcagagcaccctctccctccgtagctcatggtggcgcagcctccccaccccatcccatgtacacctgctgcctcatctcagagacactcattccagtgtctctgacagcagatgatgtcagcctcctgggtgtggagaccccagctgtcttggagagtcctcagtgcctgggtactctcagaccccctgtctctgcctccagcacatcagagacatagcagctgcctccaccagagctgctgggtgatcccaacaggccagggacagagcctgcaaagacaggaatctctgcagtcacaatgaggcaaagaaagagccccttagagcttgatcacagccacccctgatccaaatcccagcctctcattagaaggaggcttgagggttctgttgccacagcacctgtctgagcccatttcatggaggggaaaactgagatgaccaagggccagatccatagtcctgctgggcacaaggccatccccagcagctgcctaatctttgactgtgttataagtttccattatggaaaactttgaacacatacataaggagacagagaaataataatgcccccaagttcccatcacccagcccccccaataagcaattcacagacattactgacccacccatagcagaataacccctccattacacaataccagacatcacatcttttcagctgtaaatatcccatttctatgctggaaagatatgggcttaaaagtaactgcaatattattaccaaacctaaatagaaattatcactaattccctaatatcaagaaataatcatgggctcctcaaatccctcacaaatgccagaagcgtattgacttagttaagtgttggtgctgtggttattttggggttttgggtggtttatttcagaattcaatatggcatcaaatggtgatgggcgcatgtgctgtcaggccagttgtcactggtgaatatttcctcaattgctctagtgctgcctggcaaggcaggagctgcaggagttgagagctgtccggggaccttcccacggttggaatacagccacacctcccaaaacaagaacccagggctatcatctacttctttttttttccccctgcaaaatggttctagcatggagggacttaactggattcagactagacattgcaaaatagcttccaaggacagggagctgctaacagcgagatcacccatgtcagattctcactcttgtagtaatgttagctgcataggatggtcaatagctacatccctcagaagggaaggaaggcagagggatgaggcttcagttcacctccttctcatgagtgctgcagagcatctgtgaattcagaggtctgcagctgggctctgttcacccaggagtgtgcttcatgctctaggaaggagccactttgcacacagatgatccggggcccagccatccttccagggtgaataattaatgtcttctctcatggtgaactctaggattcaagccatctaatgtttttgaagccactgtcattatatttaattgatgatgacaggtggccaccaatgatgaatattttcccagggggagtctccctaagtggctttagacttcctcacatggccccaggggattaaatggctcctgattactcagaggataagaggttctgtcttatcatgttcctttcttatttgtcttatgtgtctttcctgccccaggcctgggatcccccactgatctcccttcccttagtgagaggtggtatttggagaccacattctggaggctcccttatgtcccccatttgaaaaagacaacggcagccaccaccccagctgtcccacccaacatgaggccagattcggggtgcagggatgctcccaaggttaccctaacagatgtgactggcacttcatattgggaccagccaggcctcactgaccaggcctatccaactagaactactccagaaggtggggctgaaacccaccaaggttcccagaacactgcactctagggcaatcagcctctgcatgggaggagaggggcaccctctgcaccaccccatggtgttaccaaaagttgaaccatgggttggttcaactttgcagagaagagaccacctaacccatctgtggaaattcactccttagcgatactgatgctccctaagaaattcaatcctgggcctgagtgatggttggtgcaaaaaacaaattcaagatcccagtgtcctccagaagcctggatttccagggatcctgctgtgagtcacaggacgtcaccggtccccttctctttgtgggttgagtgtgggggccatgtggactccctcatgagcagatgccaccagggccactggccccagcttcctccttcacagctgcagtgggggctggggctggggcatcccagggagggtttttgtatgagcctgtgtcacagtgtgtggtattcggcggagggaccaagctgaccgtcctaggtgagtctcttctcccctctccttccccgctcttgggacaatttctgctgtttttgtttgtttctgtatcttgtctcaacttgtggtcagcctttctccctgcatcccaggcctgagcaaggacctctgccctccctgttcagacccttgcttgcctcagcaggtcactacaaccacttcacctctgaccacaggggcaggggactagatagaatgacctactgagcctcgtctgtctgtctgtctgtctgtctctctgtttgtctctctgtctctctgtttgtctctctgactgtctgacaggcgcaggctgggtctctaagccttgttctgttctggcctcctcagtctgggttcttgtcggaacagctttgtccttgggttacctgggttccatctcctggggaattgggaacaaggggtctgagggaggcacctcctgggagactttagaaggacccagtgccctcggggctgatgctcgggaatcacagagctgggacccagagccaggatccagacccagaatgaggtaggaggtggaggggctgccctgggcgtctgggggctgccagggactgagccctgagccagcctgagactcaggaaaccccgtcaggagggagaagggagaagcagactctggacaccagaaagccaggggaagggtcacaaaaggagtggatgtgacggaagggcgggctcctgggtctcttcagaacatatcccctgtgcccagggggatcagaggggcagagtccactgcgtgaaagccccactgctatgaccaggtagccgggacgtggggtggatgccagaaaagactccacggaataagagagagcccaggacagcaggcaggctctccgatccccccaggcccttgccccatacacgggctccagaacacacatttggctggaacagcctgagggaccaaaaggccccagtatcccacagagctgaggagccaggccagaaaagtaaccccagagttcgctgtgcaggggagacacagagctctctttatctgtcaggatggcaggaggggacagggtcagggcgctgagggtcagatgtcggtgttgggggccaaggccccgagagatctcaggacaggtggtcaggtgtctaaggtaaaacagctccccgtgcagatcagggcatagtggaaaacaccctgacccctctgcctggcatagaccttcagacacagagcccctgaacaagggcaccccaacacctcatcatatactgaggtcaggggctccccaggtggacaccaggactctgaccccctgcccctcatccaccccgcaggtcagcccaaggctgccccctcggtcactctgttcccgccctcctctgaggagcttcaagccaacaaggccacactggtgtgtctcataagtgacttctacccgggagccgtgacagtggcctggaaggcagatagcagccccgtcaaggcgggagtggagaccaccacaccctccaaacaaagcaacaacaagtacgcggccagcagctatctgagcctgacgcctgagcagtggaagtcccacagaagctacagctgccaggtcacgcatgaagggagcaccgtggagaagacagtggcccctacagaatgttcataggttctcaaccctcaccccccaccacgggagactagagctgcaggatcccaggggaggggtctctcctcccaccccaaggcatcaagcccttctccctgcactcaataaaccctcaataaatattctcattgtcaatcagaaatcttgttttatctcattttttcttttctcacatataattcctagcctttcctgggttctcaatttgtggtggaaagaaccctgaacccagtgggaaagttgcctatgtgaaggggttctcagttccctgggcatctctgcaggtaaggccttcctcacccagacaccccttcctcagctctccactgtacccctgagccaccagcctcgcctggctgggaccaggggggtgtcacactctcctagattctgcctttcaacagaaacctaaccacgcatcacacggcacttctcgcatgccttctgtgtctgctccagtctctgggctaaagagttgctggtccgggacaggggataggtccgctcttggtcagatgccaggtccctgccatggcatccctgaccctatgcaacaagccagtgactctggtgagctctctgtgtcaggagaatccatgatccagagtttcatattgtcctgcaagcatctggtgggctgtagctcttgccaaactgggaaataccatggcccagcatcaggatgcaggacagtccggagagggaaatcaggagaagtgaaggggtctctggggagcccagatgtgggctagaggcagaagtaagggtgaagagcacctatgagtcaatgtcatggtctcagcaggaacacagttgaaaatccccattccacacaagaccgtttagcaggaaaggagtccatacttgtgctgccaccaggatgtcctgagaagccttggagaatgaaacatacaggtgcatttcctagacttgacaatgcacgttagccaagtaaaggcaatgaaaagttctctactagggaaataatttcctgtggtaaagcttagcttatgtaaagtcacatttatccatctggcacctctaaaagccccataatattctgcaagatactagtatgtcatggaagtagtttatgaaacataaagtgagatttaagaacaaagatgttacgggtgtatgataagatggctacaggctcagggtcaggctcgaggagtgaaggaggccgtgtcaaattcatgacaagagttggagctgggccaggctgggtcagggctgtgtgaatgcagacagagggctacaggcaaggtcaggcatccatgaacactcagctcccccagaccctcctgcccactgggaccttcgccctcccttggtcacagtggtggagccttcctacccaaacctctatggaggccctggatgactgtgcgttcttagtgcccacgcaaacttagactccctgtctctgcctccagcacatcaggaatgtggcagctgagttcaccagagctgctgggtggtcccgacaggccagggacagagcccgcaaagacaggaagctctgcagtcacaatgaggcagagaaatggccccttggtgcttgatcacagccacccctgatccaaatcccagcctctgaattagaagaaggctaaaaggttctagtggccacagtccctgtctaagcccatttcacaaatgagaaaactaagaccacccaaggagggccagttacgtaggcctgctgggtacaaggccaaggtctacttcacacccagcagctgtccaaagactgagctgtgtcataagtttatattatgaagaactctgaacatataaataaggagacagaaaaataacagtgtcccatgttctcatcacccagcactcaaaataagcaattcacagatgatgccgacccacccacagcaaaataaattctcccttacacaacatttagaaagaaatacaagacatcagatctgttcagctgtaagtactccattactgtcctggaatgacatggaccttaaaataactataatatcactaccaaacctaaatagaaattatcactaattccctaatatcgagaaataagcagggtctcctcaaatgcatcagaaacaccagaagtgctttggcttagttacatgttggtgctgttggtatttgggggtttaagtttatatgaggagcaatatgacatcaaatggtgatgggtgcatgtgccatcaggctggttgtcactggtgaatatttcctcaattgctctagagcctcccggcaaggcaggagctgcaggagctgagagctgtctggagaacttcccctggctgctatacagccacgcctcctggagcaggaacctagggcttccctcagcttttattttcctggaaaatgattctagcatgaaggggattaacttgattcagattggacattgcaaaatagcttgcaaggacagggagctgctaccagcagagtcacccatgtcagactgccactcttgtagtaatgttagctgcataggatggtcaatagctacatccctcagaagggaaggaaggcagagggttgaggcttcagttcacctccttctcatgagtgctgcagagtgtctgtgatgtcagaggtctgcagctgggctctgttcacccaggagtgtgcttcatgctctaggaaggagccactttgcacacagaagatccggggcccagccatccttccagggtgaacaattcatgtcttctctcatggtgaactctaggattcaagccatctaatgcttttgaagccactgtcattatatttaattgatgatgacaggtggccaccaatgatgaatattttcccagggggagtctccccaagtggcttcagacttcctcacatggccccaggggattaaatggctcctgattactcagaggataagaggttctgtcttatcatgttcctttcttatttgtcttatgtgtctttcctgccccaggcctgggatcccccactgatctcccttcccttagtgagaggtgatatttggagaccacattctggaggctccctcatgtcccccatttgaaaaagacaacggcagcctccaccctagctgtcccacccaacatgaggccagattcaggggtgcagggatgctcccaaggttaccctaacagatgtgactggcacttcatattgggaccagccaggcctcactgaccaggcctatccaactagaactactccagaaggtggggctgaaacccaccaaggttcccagaacactgcactctagggcaatcagcctctgcatgggaggagaggagcaccctctgcaccaccccatggtgttaccaaaagttgaaccatgggttggttcaactttgcagagaagagaccacctatcccatctgtggaaattcactccttagcgacactaatgccctctaataaattcaatcctgggcctgagtgatggttggtgcaaaaaacaaattcaagatcccagtgtcctccagaagcctggatttccagggatcctgctgtgggtcacaggatgtcaccggtcccctctctctgtgggttaagtgtgggggccatgtggactccctcatgagcagatgccaccaggaccactggccccagcttcctccttcacagctgcagtgggggctggggctaggggcatcccagggagggtttttgtatgagcctgtgtcacagtgttgggtgttcggcggagggaccaagctgaccgtcctaggtgagtctcttctcccctctccttccccgctcttgggacaatttctgctgtttttgtttgtttctgtatcttgtctcaacttgtggtcagcctttctccctgcatcccaggcctgagcaaggacctctgccctccctgttcagacccttgcttgcctcagcaggtcactacaaccacttcacctctgaccgcaggggcaggggactagatagaatgacctactgagcctcgtctgtctgtctgtctgtctgtctctctctctctgtttgtctctctgtctgtctgacaggcgcaggctgggtctctaagccttgttctgttctggcctcctcagtctgggttcttgtcggaacagctttgcccttgggttacctgggttccatctcctggggaattgggaacaaggggtctgagggaggcacctcctgggagactttagaaggacccagtgccctcggggctgatgctcgggaatcacagagctgggacccagagccaggatccagacccagaatgaggtaggaggtggaggggctgccctgggcgtctgggggctgccagggactgagccctgagccagcctgagactcaggaaaccccgtcaggagggagaagggagaagcagactctggacaccagaaagccaggggaagggtcacaaaaggagtggatgtgacggaagggcgggctcctgggtctcttcagaacatatcccctgtgcccagggggatcagaggggcagagtccactgcgtgaaagccccactgctatgaccaggtagccgggacgtggggtggatgccagaaaagactccacggaataagagagagcccaggacagcaggcaggctctccgatccccccaggcccttgccccatacacgggctccagaacacacatttggctggaacagcctgagggaccaaaaggccccagcatcccacagagctgaggagccaggccagaaaagtaaccccagagttcgctgtgcaggggagacacagagctctctttatctgtcaggatggcaggaggggacagggtcagggcgctgagggtcagatgtcggtgttgggggccaaggccccgagagatctcaggacaggtggtcaggtgtctaaggtaaaacagctccccgtgcagatcaggacatagtggaaaacaccctgacccctctgcctggcatagaccttcagacacagagcccctgaacaagggcaccccaacacctcatcatatactgaggtcaggggctccccaggtggacaccaggactctgaccccctgcccctcatccaccccgcaggtcagcccaaggctgccccctcggtcactctgttcccgccctcctctgaggagcttcaagccaacaaggccacactggtgtgtctcataagtgacttctacccgggagccgtgacagtggcctggaaggcagatagcagccccgtcaaggcgggagtggagaccaccacaccctccaaacaaagcaacaacaagtacgcggccagcagctacctgagcctgacgcctgagcagtggaagtcccacagaagctacagctgccaggtcacgcatgaagggagcaccgtggagaagacagtggcccctacagaatgttcataggttctcaaccctcaccccccaccacgggagactagagctgcaggatcccaggggaggggtctctcctcccaccccaaggcatcaagcccttctccctgcactcaataaaccctcaataaatattctcattgtcaatcagaaatcttgttttatctcattttttcttttctcacatataattcctagccttccctgggttctcaatttatggtggagggaattctgcacccagtgggaaagtcacccaagggaggaggcttacagcctccccgagtcatctctctggaaggtccttcctcttccagtcaccccttccccaactctccaccatacccctgagcctccagcctggcctcagctcagaccagtcccacaccctcctcaattttacttctcaataaagacctgatcatgtaaaacccagtttccaatgtgtcgtctgtgtctggtcatgtgcctgtgctgaagggtcactgctctgggacaggaggcagtttcaggtgagatcccatgtccccgtcaccccacaccccacccaacctgccaggaaaccgggtgagctccctgtgccagggggaaccatgttccagagcagaaagttgtccctgcagagtggtccctgaaatgcagttcttgcccacctgggaaggatgtggagcctagtgaggacagagtggtggccctgagcagggcatcggggagaaacgaggagtgttccaggaccccctgctttgggctagagacagaaaacccttgagcccaggccaagatcagagcagaaacagggttgaacttccctgtcccatccatgatacccagttaggagaccatttactaggtgccatcaccttacgttacattacaacattacgtgattgtgccatcacccgggagacatgaaaaaggctggaaaatggaacccttcagtgtagtttacactttcacaatgtacgttagctatgaaagatgctgacaagtcctgcagttggaaaacagttcatgttacataaccttgcaagtcaagaattctattcagtgtcccaacccacttagccctagagcgctcttcaagacactggtgttcatgtcactagtgctgggacatgggctgaggctgaggcacacagatgattcgttgtgatcaaatgggtcaggctcagggttaacactggccaggtcagaaagagagcatagggctgagatctcaaccatgaagagtctcgaattctaaagtcaggggacgcagtagagttagattatggttatggctggagccatgatggccagcctgtgtgagggtaggactcaggtggactgggtcaaatgagaaaggcaccatcccaagcatagaatcggcatccattggttgtctgatggaggctgtgtcaaaatcatactcgcccaagaatcagggccaggtcacactaggtcagggcagggtaagtgtgacttaagggctacaggcaggtcaagttttcatgggactcagctaccttagacccctccccaccagggcctactccctccctcaatcatgtggttcagcccctccatgtgcacctacaccctgatgtcagagacacaatcatcccagggtccctgacagcgagtgaggtggccttgggagatgcacttcccagccctcctcatcagtcttgggcactgtcaggccccttcttggtgcctccagcacatcagcggtgtggcaggtgccttcaccagagctgctgggtggccaggccaggcctgagacagagcctgcaagggcagagaactctagggccatagtggggcagagaaggggttcctcttggagcctaatcatagaacccctgcctcaagtcacaacctacaagttagaaggaaacttaagggtcctgattcccaccaccctgtctggccccatttcatagatgtgaacgctgagacccctatagcaaagaggaccgctttgatctccaccttctcaatggccctgctgggtaggatcccctctggatgtcccctggtgctgtcccaagactaatctctctaattactgccttgtaagatattacggaaactgacagcaagaaaataaaaaaacaggaggataatacagctcatgttgacccacccacaatcaagtaacctcttttacacagttgtttgaagcaaattgtagacatcatgtccattagtctaaatattccatttgtgtctctaaaaatatggacccccccaaaaaaactacattcttacaaacctaaatataaatatctaattctttcatatcaaaaaaagaatgtttcccatcaaatacttcacaaatatcctatgcttctttcactagacctgtgtttgtgttgttattctgtggttttccatttcatttctatgaggattcaatatggtttgaaattgtgactggtgactgtgtttttagacctgttctgtctgcaggtatcttcctcattgatttttaatttccttgcaaggcaggagctacaggagctgggggttggtcccaggaccttcccatggtcaggatacagcctgtggcctccccaagctggaaacaagcgctcctctctgcttctgcgtttcctgaaaattggttcttggccagaaaggtttaacaaggctcagtgtgacttttcagcaagaccgcttggctactgggctcccatgtggggtcatctatttgtgacgttagctgggcttcacactttgtatccagtgccattagatggtatatggatgcaaggtgactgcatttcagttcgaccaccttttccttctactgactgtctgtaaaaggtgtgccctcatatgttctttgctcctctgggagtgtgattcttatttcagtaagaaatagcatagacatgttgagtctttcctttcatttagcatcttaataatgatgaccatgttgcctgccatctcgtgaagatgaacaattatttcatggtgagctcaaagttatgttactgtatgtgactcacttgagtccaccatggttctattttattgatgatgacaacgacccaccgtggcccactcagtgcctcttctggtggccccaggatcctcctgaaggaacccaggagacctcgatggctttccactctctgttcacaatctatcctgggcacatctttctcctgccttgtgcctggaattgcccattaaccccaagtggactagtccccataactgggaggtgggatttagtgaccacacttggggtgcttctcacacagcccttttgagtcagacactccagacatacccagaaatgagacaagaccctgaaagggtaacaggggcttgcttccaacttctccctggaggttgaggctggcatttcatactaaaacctagtgagacccatcccaaactaagacaacacaaggaggacggaagtgagacgccctggagttgtggttgtggtcacgttggagcttcccatgactgctgactctggggcaagctgcccctcctctaaggcactcactggggacacctgaggacgcctcctgctcttaccctgtagtcacaccaagagatcagggttacaacaaccctatagagaatccctgtccccttccatgtcacttcactccttcgtgaagcaaatgccctcaaggagctcattcccattcctgggtcacagtcacctggaaaacctgatccagacaccaacctcctcaggcctcgccatttccagacgtcccgttactgcatacgcttggtcgactgtcccatctcagcttgagaagggcaggcaggtgtgtggactctgctgagcaaatgccttccaggggcagtggtctggcttcctgcaccatagcttcaggtgggggatggggagggggagttaggggccccagggaagagtttttgtatgaacctgtgtcaccgcattttgtatttggtggaggaacccagctgatcattttagatgagtctcttcttccctttctttccctgccaagttggtgacaattttattctgatttcgatctttgtctgtgacttgccacagcctgtggtcagggtttcctttgggacctcggtcctgggaggctgatctctctcctccctattcagacccctgtatgcctcagctggtcactgagacaccttcatctcctctgaccccagaggcagggagctccaagacaaggccacactggtgtgtctcatgagtgacttctacccgagagccatgacagtggcctggaagatagatggcatcaccatcacccagggtgtggagaccaccacaccctccaaacagagcaacaagtatgcggccagcagctacctaagactggcacccgacagtggaagtcccacaacctctacagctgccaggtcacgcatgaaaggaacactgtggagaagacagtggcccctgcagaatgttcttaggtccccgaccctcacctacacacgggggcctagagctgcaggatcagggcatgtgtctcccctcccactccaagtcatccagcccttctccctgcacccagtaaccctcaataaatatcctcattgtcaaccagaaatcctgctgtctgtcttcatttcttatctcatatttagtttgcaacctccttaaattctaagcaaggatgaggaaaatccaggtgcccagtttatcgggtgagaagtccatggtggtgccatcaccaggaacttgtggaaaggtctgggaatggaaactcacaggtgaatttcacagattttcacaatacagggtggctaagtaaagacacttacaagtcctgcaatagggaaacaggaagtccagaatcctgctcaccatcccagccaacttagtgagccctaggatgctctgcaagatactggtgttcacgtcgctagctctggaaagtggggtgaggctggggcacacgggtgatcagttatgatcagatgggcttagggtgaggttcaaagttaaccagcacgtggctgagatctcaaccatgaagttcccaattctaaagtcaggctctggggtggagtgagtatgtgcttggtgtgtggctgagcctgtgatggtcagctcgtgtgaggggaggactcctgtggactgagacaaatgagcaaagacaccatcccaggcacagaacgggcatcccatggttgtcggggagagtctgtgtcagagtctcattctggactagagtcaaggctgggtcacgcaaggtcagcacagggtgaacatgacctaggggctatctataggcaaagtcaggctttcacgggatctcaactgccccaaacacccccatcccaccaggccccactccctctgtcactcacgttgttccgtcccctcaccccctgcaccatggtgcaccggcagcctcactcagagacaccctcatcccggggtccctgacagtgggcaatttggtcccttgaaggccttgacaggctcggttaatccatagtgcccgggctgggacccccactgtttctggttcatcagggacatggcagcagctgctgggtggccagccaggacaggaacagagctgcaaggcctgggggctttttccacaatgatacacaaagagaggggcccctttggagctcagtcccagccacccctgccccaaatcacagccgtgagctgaattgaatttcaggtgcccagagtccctcagcctctgtttgacccatttcacagctatgaaaattcaagcccatgggagacactgtcccaagcttcaccctctctataagttgtacatttttatgatgaagatctctgaacacaaaaatagggagacagaagaatagtaatgactccaaggttcccatcagccagtccgcagcatcatccattttcagataatgcggacccacccacagcagaataactaaactactccttcaagcaagggtgtgaagcaaatgctagtcatcacacacacaactggagagaatatcaaggatttcttgacatcaaaaatagttaatgagagtcttatcaaatgtcttgtgaatatcattgtgtctatttttgtcgactttgtggtgctgttgcatatttgtgatttaatttcatttctatgtggattaaatacttgacgttatcattggtgaatgtgtttttagacccattccatctgcaggtgtctcccaaattgctctagctttccctggcaaggcaggagctgcaggagcagagagctggtcccgggacctcccacagtcgggatgcaggcgccacctccctgagcaggaacccagtgcttccctcaacctctcttttcctgaaaaatggttctagcatcaagaggctcaagggggttcaggctggacattggcaaactcgcttcccaggacacgtggctacttccagcaaagccacccatgttgtgttgtcattctttcagtgacattagctgcatttgatgatcaataacttcgcgcctcagatgagaaggaaggcagatggtcaagacttcggtccacctccttctcatgagggcttccagaagggagggcacagcagctgcaccgtgcgctcaggagtgtgcttcatgctttgggaagaagaaaaaatgtacattcttcccttttgttcaccactttgataactgatgatctggtgcccagccatcctccagggcgcacagcacaatgtagtaccggagtgagctctagcgtgtgaggacatctgacatgtgggctccactgcagatatactgaattgcaatgacaatgcggctacaaaacataaacatttacccactgggcgcctcctcaggtggcatctgattttctcccattgccccaggagcttccatggctcctgatttctcggaggatgagaggttctgtctcatcatgtccctttcctgccccaggcctgggatcccgcactgacctcacctcccttagcagaaggtgatatttggagaccacactcgggagctcctttatgtccctcacatttgaataaggcagtggcagccactaccccacctcacccaccaaaatgagaccaggttgaggggtgcaggagatccttccattttaccctggaggatagggctggcatttccagtggggaccagccaggcctcactggccaggcccatcccaactaggacaagcccagggaaggctgggctgaggctcctggagtcacagataggttcatgggaagcttcccaagacaccgcactctagggtaaccagcttcttcctggagggagagggcactctctgcatcaccccagggcgtcaccaagcagtcagtgtcgagtcagctccaccagggagaccatttatccctgaccatgggagttcactcctagtgacacagtgccctccaataaactcatccccatggctgcatgatggttggtgggaaaaccaaatccactgtcctccaggaaccaggatttctagggatcctgctggtcacaggatgtcacctgtccccttctctctgtgggggtgagtgtggcagccgtgtgaactccctcatgagcagatgccaccaggggctgtggcctcagcttcctccatcacagctgcagcgggggttgggggtagaggcgtccagagagggtttttgtatgagcctgtgtcacagcactgggtgtttggtgaggggacggagctgaccgtcctagatgagtcttttccccctccttccctggtctccccaaggtactgggaaattttctgctgcttttgttcttttctgtatcttgtgttgacctgtggtgatgctttctctctggagcctaggccctggtcaaggacctctcccctccctgtttagacccttacctcagtgggtcaccaagaccccttcacctctgacctcagatgtagggcactagactggatgacctactgagactcatctgtctgtctgtctgccagagccaggctgcttccctaaaacttgctcagttctgtcctcccccacctgggcttctgtctaacgaactttgtgcaagggaaactgaggccccatctcatgagggagagggaacaaggggctcgaaggagtgaccacctggtggactttagaaggacctgaaaccctcagagccaagataggggaatgaaaactcagagtctcagggcccagtcccctggactgtgggactctggatccaggctgggaacaaggtaggaggtgcaggggcctctccaggtttctgtgggctcccagggagagagccctgagctggtctgggacccatgaagccctgtcaggagggacgggaaggctctggacatgaaggagccaggtgaagtgtcacgaaaggccatggcattcagggaggtggctgatgggtctctgtgggaggcacccctagaagcaggaacccctgagttcaccgacaggcatatcccaaggcagaaaaactgtagattggccctaaacacagagagactctaacacagactccacagacaaagagcccaggacagacagacagtgggacttgggtgagcaaaggccctgactccactgcagaagatccaggagagacggatgtgggtacaaacagagttcttacgtgagagacccactctcccccaacccagagcagctgtgtcaggtgagaaaagtttccagagtgaatctaacaagaggctcacagagctcagagaacacagccagagccggatcacgtcaggatgacagggtgaggcagcgccaggcaattgaaggtccactgtctatacaaaagcccaagtccttggaagatttccaaacaggcgatgggcaggggccaagctcagaggttttctgactgacagagttcttttaggaacatgatgtcacacccttctgagacagtgtggaccacatctgagaggtcctgcactggtactggggggcctgaacactcctcatgcactgaggtcaggggctccccaggtggacaccaggactctgacctcctgcccctcatccattctgcaggtccgctcaaggccacccccttggtcactctgttcccgccctcctctgaggagctccaagccaacaaggccatgctggtgtgtctcataaatgacttctacccaggagccatagaaggaaaatggcaccctagtcaccaagggcatagagacaaccacaccctccacacagagcaacaacaactatgcggccagcagctacctgagcctgacgcccgagcagtggaagtcccacagaagctacagctgccaggtcacgcacaaagaaagtaccatggagaagacaatggcccatgcagaatgttcttaggcccccgaccctcaccccacccacaggggcctggagctgcaggatcccagggcagaggtgttccctcccaccccaagtcatccagtccttctgccgacacccaataaaccctcaataaatgtcctccttgtcaatcagaaaacatgctgtctgctcatttttgtttatccactttccatcctaaatttttttatctccaaagatcaacagaatcctttggacttgtgacaatgcagcctgggaccatcttcgtgtttctctgagccgtactttttccatcaccttatccccatagaatgttccagaacaaggaaatagtcttcagaaggaaccagacatcttcattcttacccacgtctctgttgtgcttcctgctgccctgtgagcacgtccacctctggctgcccggggacacaccctccttacatccctatggccccgggagaacatctcagctcccttctttgttgtcctcggccctcactgtccagatgccatccctctctcaaggtgtttgtccatccccctccaaggccatgtggtcaccccacctgtatttcccctcatcaaagcctagagcatctccccttctccatgggcacactctgttcccgtcatcccagggaccctgccctcagcccccacaggccctccctataataatcactgatgggatgcttaccccctggaccctggtcactcaccccacatccccctctgggtgcctctcatcccacatgtgtcaccggatgccccagctgtattcaacattcctaggggacaagggtcggctctgctcctcactgacaccattatgaatgcctaatgtcctgctgtgcacaagttgtcaattgactggtgagttcaaagtcagattctggggttatgccaggagcttgggtgacgctgattcttcttctgaagaactcagcatgggatctgagctataatacacacacacgtgtacacacacacaatgcacataaacacacatgtccatgctgggcatccttctgggaggatcaggaaggtagaaggggctgcagtcaggcccaggtcaggacatgagcaaagcaaagctgagacctgctgtctccaggctttgggactagggggtcgcccctggatatgggagggtggggcagggttttctgtccaggccaagagggagacaggagaagatgtggacgggattctgatcagggagcagcaggccacatctcagcagtcaggggaggcgcttgctgtggggaatactgttggggactgcatggtgccaggagtgtgtcccaggtgtgagctcttcaggtgatgggcccagaccaggatgcaggtccaggctgtgtgtgtccaggccccacactgcacatgcccatccactgtgggtgccccccgtgccggtgacactccagagcacaggctgtgtgggtcacccgtgcatgtaggggactgcagagcacacacatgtgggtgtgtgtgtaagccgggggagctgaagtggacagcagagatcccccacacgtagagctcctggaggaaaccacactgccagtgaggcctatgacctcccttgagaagctctcctctgggccattgcagctctaatccagcacacatggcctataggtaggaagctgtccccatgggttcaggaggcggacttgggcagtgatctgtgagctgctccttcaggacagctgggccaaggatgctggagctcagaccttgcagtggggtctgtgtccctgtggtcaacgtcattcttcccacaacccccaattcccattccaagcccatcccatcataacctccagtgctgaggatgtggggggcatcaaggaccctccccaccattcccaacttctcaaagaggtcccagctgcaccatgtcagtggcgtcacccagccgctcacctccccttcctccctggcattcctgacaccagctgatccaggccacccaactcctcagaaatgcaattacctgggagacaattccacacacagacctgtcaacccttcccatgactgaggtggatgaacccctaagcccccaaggaagtgatattcaggtcagtagaaggtgacccccttcaccccacctatggctcacccacccatgagaaaagggggctggaccctgggccttgtgagcagctgcagggggttggggggcggggtggcctgggtcgggtgtatcaggagggtttgtgtgcagggttatatcacagtgtaatgtgttcggcagtggcaccaaggtgaccgtcctcggtgagtccccttttctattcttttgggtctagggtgagatctggggagacttttctgtcctttctgttctctctagggtagaggtctcaatctctctggggtctgccaccattgccttttttcctggccccaatttcctccagcctgtcccttcttaggcacctggtggggcatgatgggaagatcccagtgacctcttaatgctccctgctcaggcctgaacctgccgctgtcactcagggggcattctcccctgggctctgggatgttctgctccctcgcacagagtctccagtccccaaagaccagcagagcaggggctcaggctggggcaccagggccatgggacaggggaaggatgctggaaaaagttcagcttcccagggttctgggtcccaactatggggctgctttaaacaccaagaagggaggcctttgactggggacttggggaaatgaagggggacaaggatggaggaagaatgtcctgtgaggtggcgccagggtgctgggtccctcctcctcccccgggacaggcaggctgccatagacagggtggttctcaggacactcagtccaaggttagagcctccccatcccacccaaaaagagagacccccaaagcagatgctgagggaggcactcctggtgggcgcaggtgacagggacctgtcaggacagacatttgtcctaggacagccagatctcccaacgacagggagaccccatagagcagacacagcgccaggctcagaacagaaaatatacctcacatgcaagccctccatctcctggactcccaggacccggctcccaggactgacatcccctccccaccaaggggcctctgtgggaaagtggggcagagactgcaatgatggtgctgggggatatgtgaggaagaaattcacttgtcaaaagggaggagaacctaaaaacaggacacagatgccctcgtgaacagacccagaggagggacctggcaggggatgttcagacagagacgtcccccaaggaaagacgagggcccagggctgaacccagccagcgtcggggagcataggtgaggtgagagctggctgataaggaggggagaatctggagaggaggctggagcagaagaggcctgattctcctcagtcctcagatgctgaggagtttcccatcaggaggtaagcgtccccgccaccgccaagttgacctcagtacagcaagggcccagcctgaggtccctatcctgggccttagtccttcacccacctgaaaactgaggccaggggctccccaggtggacaccaggactctgaccccctgcccctcatccaccccgcaggtcagcccaaggctgccccctcggtcactctgttcccgccctcctctgaggagcttcaagccaacaaggccacactggtgtgcctgatcagtgacttctacccgggagctgtgaaagtggcctggaaggcagatggcagccccgtcaacgcgggagtggagaccaccacaccctccaaacagagcaacaacaagtacgcggccagcagctagctacctgagcctgacgcctgagcagtggaagtcccacagaagctacagttgccaggtcacgcatgaagggagcaccgtggagaagacagtggcccctgcagaatgctcttaggcccccgaccctcaccccacccacaggggcctggagctgcaggttcccaggggagggggtctctctccccatcccaagtcatccagcccttcttcctacactcaataaaccctcaataaatatcctcagtccaccagaaaccctgggttttgtgttttgcttctgtttatacattttctaccctaaattggtccaacctgcaagatgaacaaaattcttttagccttgtgggaatgaagtctggattgtttttgaggggtagttccaccatcacctagaaaggcccagagaatattccagaacagagccttgggcagcaggccccaggactgcccctttcccatacgtgctgtgtttgtgtggacatgtccacctccagcggcctggggcgaccgctccttggttccccatggcccagaagaacgagtaccctccacggatcatcaggcctcacccctggacagcctccctctctcaaggggtccctccttctgaggcggaaggagcctctccagtccatgggcccttggtctcccctactccttaggggcccaccctgttcctgactcccaggaccctgccctctacccccacatctatctctgaagcaggcacagactggaccctgaccctctggacccaggtcactcaccccacaggccagctgggtacccctggtcccacatgtgtcaccagtgtcccagttatactcaagtcccctgggggataagggtcaactctactctctctcacccctaagtaaccagcccaaaactgaccacacctcaagtacctaatgtccagttatccacggatggtcagtggggctggggaggtcaaagtcaatcatgagattccagagtggtgccatagacgtgcctgtaaaccaattggtctttttaagagctgtatgtgggatctaagaaccgggttgatgattgtcccaggaggtagcacaggatggggggcctgggctatgagacaaacacacatacatacatgttcacaaacataaacacacatgaacacctcataggcacacaggtattcacaaacaaacatgcctgcatgcaaatacatacacacacactctcctgtgctatttagaatcattaccacatgggcatcccactaggggctgtgctgggcatccaggaccctcccagggaactcggatctccataggggaccagctccaccttccctgtggcataaacaggcttctcacttcttccatggtgacagtctccaaaggagctgagccgggacacatggcttcctccaggacagagagtagcaggggacccagatgtgatgtgcagacatgcctcctccctctcccctctccctctgggggtgaagggatccctgacttccagtaaagtgtgcatccatgcatggaggggccatccccctcaccctcctatcggccagacctgcttcatgacagggccactggacctgggcgcccaagctgctgcagcggggaacgggtcgggtgtgtcaggaggggtttgtgtgtggggctgtgtcactgtgtgctgtgttcggaggaggcacccagctgaccgccctcggtaagtctccccgcttctctcctctttgagatcccaagttaaacacggggagtttttccctttcctgtctgtcgaaggctaaggtctaagcctgtctggatgtctggaatctttgcccctccttgcctgggctcctgccctcttctgtgattctgtcctctgtgggtcccagttacggggctgcattaaacacagtgacaggaggcctttgactgaggacttggagagatgggggaggaaatggcaggaggacaaagatagaggaagaatattccgtgagaaggtggccccacagcgctgggtcacacgccatcccccaagacaggcaggacaccacagacagggtggtgggtctcagaaaactcaggccctaaacgtggatgcttaccaattcctccactggaggaagacctcagagcagatgcccaggacagggacttctggtagggacggtgactgggacgggtgcctgtttgtcagggaaaacccactggagagtcagatcccccagataacttctcacgacatggagactctttcgaacagacaaagctccacgttcagctcagggagtaaaaaaaaaatgcctcaaatggaggcctttgatctactggaatccagcccccaggactgacaccctgtctcaccaggcagcccagaggggtctctgcagggaggtggggtgggggctgcaatgatggcaccagggagatgtgtgggtaagaaacccactccctgtgagagagaagagcctgaacccaggaccaacagctgccctgcatgaagagatgagaacaaggggaactggtaggaggtgttcagacagacacccccaagatagacaaatacccagggtgagatgtggtcctggactccatcccatccagtgtggagccagcaccggtgggggtctataggtgatggaaaatatgaaaaagagacagatccaagagggggtctgtgacccccaagagtgggggcaactcccatctgacagcgagtgtctccactcaccgctgacctgacctcagtccagcaagggtccggcctgaggtccctgccctgggccttagtcccatacccacttcaagactgaggtcaggggctccccaggtggacaccaggactctgaccccctgcccctcatccaccccgcaggtcagcccaaggctgccccctcggtcactctgttcccaccctcctctgaggagcttcaagccaacaaggccacactggtgtgtctcgtaagtgacttctacccgggagccgtgacagtggcctggaaggcagatggcagccccgtcaaggtgggagtggagaccaccaaaccctccaaacaaagcaacaacaagtatgcggccagcagctacctgagcctgacgcccgagcagtggaagtcccacagaagctacagctgccgggtcacgcatgaagggagcaccgtggagaagacagtggcccctgcagaatgctcttaggcccccgaccctcaccccacccacaggggcctggagctgcaggttcccaggggaggggtctctgcccccatcccaagtcatccagcccttctcaataaatatcctcatcgtcaacgagaaatcctgctccctctcttcttttcttatctcacacataatttgaggcctcccctgggttctcagtgttgggtgggggaatcctggcacccagtgagaaagtggccctgagggagaggctcatagcctcccggggtgtctcctggtgaaagaggcccggataggagaagtctgatcactgaacaccagtccctctgccctttcattcctcccccttctcctcaaagcatagccccccacctccctgcctcctgcctggatggagttgtctctggctgggactccagttacaccctctatctctgccctaacagagacacccttcacccaccatctcttttcccagcctgaaaaccctgctccaagcctggagcctctttgcccctggcccttgcccccggaatgccctcctccctctgtgcccagctcagctcccacccaccctcaccccctccctgtcatccctgagagccagactgtccaggacactccagcaccactgacttctcaagctgttcaatgagggacccacctcgattcctcacctgacagcaggttcagacacttaagaggaatgggaggaagccaggaaggagactcacacgaaaggcctacaggaggctcgggacacttggaaaagataggctctgagctccctaggaaccagtgcaaggagggtaataagcacttcaccacttctgtaaatttaaacaaaccctttgctgaagggaaggtggtgttctcaatgctggggccagtcatctcgtcacaactaaaagtgggaacatgttctatccaaggcctcagtagtaatgggatgtgaaccttgacacacgcacaggtaactatctggcagcccttagacatggtgattctctcaagtgcgtgaacagaaagtcactggccgtctttgggaacatcatttttgggaacacttctccattggatcccgggccttcactggaaaaccaggtccctcatcaggactttctctgtgaggttccctgagtctggggctccaactgctctctgagaggaaggggtgggggaagagaacacgacccagccccacccagcccctcctgcatggcccctcctctgtagagtgggggcacctgcaggggtcaggcctgggttactgtgggtggggcctgggaggggcccttgtggcatcctggggagtctctcccacggctccttgtttgactttcctgtggctgctggctgttatcacaaatgacccctaatttagtgccttaaaacatcacacactgattctctcccaggtctggaggtcagaagtccaaaatgagtccttgggggctaaaatcagggtcccagcagggccggctccttctggggactctggggagaattcgtttccaggacttttccagcttctagaggacaacctcagctcctggccccttcctccaacttcagagcctgagctcagcatcttcaaatctctctcttgctcttctctccctccctaccttcttctctccctctcttccttctctctctctccgtctccctccatccccacatcttgtcctctcactctgaccctcctgcctccctctttcttctataaagaccccagcttggacccacctggataacccaggagcatttcccacctcaggctcctaattgacatgacatctgcaaagtccctgtggccacacatgacacatagacaggtccaggattgggacacgactgtccccgcggggcctaatttagccgaccacagcccctttcccgagttcctctccctttctccatgccctgcccagtccaggctgagccactcctggggggccgtcccagcccagcccaagccctccctatccctggtctcttgtggccccttctcctcctggggttccaggaaggcactgggagtttagccacagctctagggcactgtcttccagcaggccccctgagactaaatgccctccaggccaaatcacccttggaggaagatcctattgtgatcctcactctaggatggtgacatcacagcccagagagcctgagtgacctgccacaggtcacagtagggactcaaacctggtccacccaactgcagatctcagctctggaccccaggtgcctggctgccctcagcccacctggccacgcccacccacttcatccagcttcctccctggagagctcaaagcccactggacccaggcccccatcccgggacccgggattcaagtgacagaattattggaccaacaagggatggaaggggacggggcctcaggttggagtagccagattcctcatgccccttctccttcctccgggtcaaatatcagggtcagggcactcggagggagggaccatgagagtccccttttcctagagaccccatctcagtcctggttctggatccagggcttacggtgtcccccacctccaggagagtcagtccctggcaggtggctccccaagcccaatcccctccattcctggtcccagttgctccctcaacatccaaaaattcctgacatcttcagtcagggactgctctcccaagggaagagcacatggggctctgggtctggggctgtgggaaagaggaaccccggtcctctcggggcccagcaccgagcgcagtaggtgttcgaggggggctgagtggtgacatgtgagactctttgtagaaccccagattcaggttcgtgtacctgatatgcagcggaggtcaaaaactgacacaagtgcttggagatagaaaaagatttatttcatttggctaaagtaagaagacaagaaagcaaattcctccactccatgttaacaaaaggatgaagcagggagtttttatgtggctaaggagtgagggaggtggcatttcaggggaaaagtctgtgtttattcagtctcaggtaacatcttaagcaactagacttgcgggcgacagcggctggtctctacgtccctaaaggcattcactcctgcaaaatacttttgtgactctgaagttatctcctccttcttgacaaagaaacaggacatctgcagcttatgatcacattgtgtgaacaagggatgctgggcaaaaagcaagcagttaacttgtacaagcaggcaagggccaaatcagaattttctttacttcagtcacaaaaatgctgggtactgaaatctcaactcacctggtgtcactcccagggcacaggctaggacaacacgcacccgtccctggagaactctgggctggttcccccttctccccctgctgaccccctcttagtctacctccgctcctcccttcccccaccggagaacctcccagggtttccatttcctcccggataacataacacgtgctgccctgtgaggaggtgctaaagtcaagagcaaggtggcagggggctttcgagcaagaggcgacctgacttcagagaccctcagtccccaagacagacgcatgccctttgagagagcggccgccccaggcacacgcaggctctgggctgtcaggatgggagcacgtggtcctcttccacccacctcccgaatctcccctgctccccgcacccatttccctgtggcccccatttccctgtggtcactgtaatcggaccccactccagtccccttccccactgactctgggagctggggttgatgctggggctggagcagtgaccagcccatggtgaccccggccccatccaggtactaggccactggccaccaatcaactatggtttcccaagcacccatatgtgcccagcctgggcttgggacccaggcctagtcctgcctggcccactgcagcagtaatggtgggctcttcctggagagaacctggaccacagtctctctgcctcaacatctcagtatgaagggccagagaccctcctgatggtcaccttaggagcacaaatgtggtcctgccaggaagaagtaataaaatgtgaatgctgccttcctctggctgcccctccctctctcctgccttttacaagtggtaatcaagggctcctggcctccacggtcccctcccttcctgcctcaagcccagcagtctcaccaccaccccatcacagccccagtggcctgcacgtggctcaatccaatggtcccctcactgtcctccttctgttgacctcaggatgggcttggcaactcacatcattctcgtcatcttgaagcccctcacccacccacccccacccccccgcccccccgccaaggtcctctcttctatggtcccctcccactttgttctgctgctgccccatcagggccaccggcagctagcacccttggtgactctttctttcactgtgtgattcatgaactaccggaatgtaaaagggttccttgctccttccccggccccagccctcagcccagtggtgcctcaggcttgatggctgcccagggctgctgaccacgctctcctggtgccgccctgcccagcaccgatctgggacaccacgggagcctggaagcaggggctgcacccctcacgtcctccgatgttcagccaggtgctgggctgggtatcactgagcccctcgatggccactgctcgacagtggaactgctcccggctctgctgaagatgctacctcacctgccacctggcccagggccacttccagggaaaccctgcactggcgtctgtcctctctatgtcatgggatcccaaaccaccccaggaggcacgtgtccatgtcccgcacaccttacagatgaggagacggagattcggagaccagcagcctgcccgagtcccacagctgcccagggctgcacagatggtgggcactgggactctgatccaaggtcaacccagagccagccccttccctaaggcgtgcagaggaggctgagcctgcccaggtcctgcaggtgttcagggcagcacagtggttgcccaggcccctgacctaggccacccttccatcctgaggccgtgcctgggcaaggccaagagatggtgctgagtgcatgaacccccttgtggctctgtgggatgggcagacctgggctcctcattctctgttgactcagtgggtgaaagaggcaggcaggagggcagccatgggggtgccctctgagtctacaaagcagagccaggacaggtgttcatgtgcccatttcacagatgagaggactgaggctccgatgggaggggtgatgacccacctagggtcacacagtaggttaccggctgacccatgcccgcctcttttcatgactcctcggccctaagggcttttcattcattcattcatccattcatttgttcagactcactcattcattcattcaacaaactctcagctgtgggccaggggctggtgtatgcagcccaggaccacctgccctagaggagctcacaagcttggagaacgacatggagacaccactgcccccaccctgtcaagtctccaaggttggcactctgcccagggagtgtctggggcagcaggagcatctccccacactcaggaaaagatttaactgaaagaaccatctgagagagccccagctgtgatccttgggccacagtgggaacatcacagtccctcactgaccctcacagtgaccctgaggcctaaagctgccattgcccacctcacagaggggacgtgaaccatgatggatgcaccagcgctgcccaggctccacccagttcaggagtagccgagttgggccttagcccacgcctgtcttcacatgccactgtgtctagctcagaccggggccagcccctcacgagtgatggcctcatgacaccgaaggagggttggtctgtgctgggggaacccctcaaggtatagggaagagtgtcacagtgggggatggggtgagaggaactcgtcctggccctggccctgcttagctgcagcctgggctgagggaggtgttctgagtcagatcagggaggggccctgtggcttcctctacagcaaagccagagcccagaatagcctgggagggggtgcaggggccctgctggaggagaggggggtggctgctcagggccctgcgggaggaaaagactgggagctactatgaactgagtgggtgactctcccatcaggcccagcctcctgtggggcctgcaaagccaccaagagagtgtccccagccaggcctggacaaaggcaccattacccttcaacccccatattcactgaatccaggggcaagaagggggacatcgacactcacctgggaacaagcaaaccagctcagatgccccataacgaggccaccagatcccaggcaagcccccattcctcaacacaaaggtccaaaatcaagtttccagccaactagaacatgcgaattttggggacatagaggaaataatcaccatccactcgcaatgcccactgctaatgacacagcacaatgctgaggatgttgctcctccctcccgacatgtcatcctcttctccagagtctctgtcacaccagggccaggttctggattccccacccaccccgcctgcaggacacgagtccttgatgttgaccccacaccctgggctccatccctgacctaaggaccagcttctacggccctgaaagagtcgtgtgtcatgacttgacactggtcctcttccctgtgctgaatgagacgtgaaggaaaaatgaacccaaatctgcccaggatcccctgcgccacacgtgagatgctccagttccctcggggattcagaagcatccctagctggcatcaacggaggccgggaagactaggtcttttcccaaaatgcttagttatgcaaacacctcaaaaggcacccgtacctcttgtaacaacccaagcgtgaggactccctctttctggggtgatctggggaaactgctctcctacatggtcatcttgaggattgcagatgggccacggaaatgtcaacacagtgacatcagcaggggcagtagggtcaggatcagggtcagtctttgtcacttggtcacttgggaccacatcaaacctgaccctgtttggccagtaatttcacaagggtggtctccccaggaaacacgtgggctgggcaaggtctgaggggagggggatgacctgcatcctgcattttccaggacattcccagtttgtgccactgactctggaagctgaggtggatgctagagcagtgtccagcccctggtgaccctagccccatccaggtccccagaccactggccaccaatcagctgcagtttcccaggtgcctatgtgtacccagcctcagctcgggacccaggcctggccgtgcctggcccattgtagcagtaatggtgggctctgcccagagacccaggcctgggctgcctccaggacccccacccacatctatcagagagactcgtgaagttattaatagtgccccttccactcccaggaacatcccagtttaaacaacaaactttggttgcccaagctcagagtaaccgtttgctaaatgactgaatgacgttcttcataatggctaataatgagggggaggaagccaagcccagccacctagcactatggtaagcagtgctggacattacaatgggggccaggggccaggagagcctcactaggggccacatccaggcagtcaccatgacattcctggtcccctgcctggagcccctagaaatgagctcactcaggcccagctcacaacacaaccaggggtggccctaataccatctcccactcagcaacagcacaccacgtccagagaccggcaagggacagctcctctgggcagccctagttcctggggagaccacaggcagcagggagaatgcctcctggctttgggacaggagccagggaggggctgggtgacttctgtggctggcaacacagagcccccgtgtcagctccaggaaagagtagcccacagccaggacgacccaccagggcacccgcagtgtgcctctttccatacaggccatccttcatggtgactctctcttcctatagcaacaccaacacccttgatctggccacgggtccctcctgcttctcacatcaggtctgatgtccactgagcatccaatgtgccagttgccgtgccaggcaccaaagcctggacccctcacaggtgtcactaggatgggccctccctgcccacccagttcccagcctgtgcagggacatgttgggactttctgactatggaaatgatagaggagaaaggggcctcatcttcacagtttcaggccaaaggggagcctcccactcagacccctagacacatcctctcctgacctgtctggggaggaggatgggaagtggtggtcagacttggcctgggctcccacaggggacagaaagtttgcaaaggtctgggcagcagagagcagctcccagaaggaaggggtgctggtccccaggggctgctgggcagagtagctgaagaaggtgagaccccagaccggccaggtaagtaagcccccttctcaggggctgcccagagcgaagtcacatgttcagctctcttctgaggacctgctgctcctggaaacccagcagggttaaggcaggcacagccaggttcagacagctcatgtttgcgggagagggaaatcaagtcaacagacaaggaacaatgtcatgtaggaggcgggatttgtgctggggagaaatagggcagaggatggggggtagggagcacctggctggggtctcacggggggcgacgtcccaggggctggaggcagccagcgactgaggagccctgactagcgccaggcccctgtggctggagttagtggctcgagctcagcctcagtttcccctctgtgcagctgggttgataataatggaaactgactctctgggtggggggagggacaatcagatggaaaatagatgttttgtttgtctctgccgttggttgttttcatccttgggctgttccagccccagacagcctcaggccagccccctgcccatgctgggctccccaccggccctggaaccctcaccccagtgcagctggcctggtgaaaccaagagtgcctgaggcccgaaatagctgggaaaccccaccaagcctcagccctggcagcaggtgcctccttctccccagggtgggaggcaggggggcgattcagtttccaaagcttccaccagcccagctggagaatggtcctgtgtccccgcaccaagacacccaagccccgtgcccaggcttgagttagacagggtctggagatcatggtcaatcaatgatcagaagtagcaccttctgctccagaagcttctattcatgcaggccctaccccctcctcacagctccccaggaaccgttctaaatgccaggttcagagctgtgcccaattggggggcacagccagacacttggagctcagaggggcctggggtgggcagggctggccagagctggacatgggaccctgctgatcacactccacctgccgcccccaggtcttggacccttcaagggagctgggccaagtaaggggatgggaagggaaacaagaacccttccaagagcttccctgggagcccagagcctgaggcagtaacgaagctcctggaagcacagctgccaagaggacttccggggtccctacccagtgggcaggacctcagactggtcagtcacttatttgtgtgtctgtccatccatatatctgaacatgcacacacacacacacgcacacacacacacacactcatccttccacaagccccgaggcctggcctgtgcagggctcttgacacatggtgtcccaggcaaggcaggactgccccagcccacccccaggtgagacctggagtgtgccttctcatgggaggagggggctgtggccttggggtgccccattccctgtccagtcttccccatgctgggtctagatgctgaggtcaaagagaggttgacaggtgtgaggaacaggccactgtggtgaggcttaatgccccctgtccgatgaccagatcctacccactgcccccgttacagacctccctgtctttctccatgtggaggaaacgttcccaggatattccagggctccaggttctgatgagagtatgggaggagaccaagtacccagcctcagggcctgggttcacccctgcagacggcaaatcccatccacctgtgggacttcaccagctcattcttagaggacaccagcctggagctcccttggcccaggaaagccaggagccaggcccgccacacgtagccattgcacatgtcacctgacacataagatgcgaactgtagggtgggcaggccagggatgagtgcccccacctctgccttcctccccacaggcccacccacgaggctgaacagggtggccctagacccagcaccatcttcaatcagctcatccactggcatcccccaccaccgtcccctcaacatgcacaggatgccagccacccaggccagttcctgaagtaaagcaagcaagggggggtacttgtccccgcccagcccagagctcagattgcagatgagacccccttgcttgaagaagacaaggggcaggagatactggggattccatgtggtcatcaaaggtagcctggtggcagcagcaacctcaaacaggcctaggagctggatcaaggactgaagggcagagagaggacgggtgtgttagggggtgagtgtgagcaaaggtataggagtgaccacagcatcccttcttcccacagggccacagtagtgcacaagggccctcatggaagcaccctgaaagctcacctcaaaggccccatactctgtcccccacgtcacctggcctgccaccctacttaatacccaggaagtccttggagtctgtgccacatggatgggctccaagatggaccaggcttccaggggggcagggaacaagggagaaaagaggtctgggccctgcataggacacaggtagtgaccacccggtggaggagagggaatgagcagaggatgctgggagccaggcccaaggcagggccctgcagggtgcacagttctctgggttggacggtggaccaaggccatgaacattcatgctggtccaggccagtggaccagagtgccccaagccccagagctctgcagaggggcaggggcagggcccagagagagcaaggccgagagtagaggccctaaacctcaggtctgaccagatctgcaactctacaggtagctgcatcctgtgttgagacgctattgagtggccttattgtcccgtaccatttataaaacacgtggacacatgttatccacctgagccactcagggattctgtgaggccacagccagaatcatggtcccatttcacaggtaggaaaactgaggcccagagcagttagatcccaaaaagccagagccagctctgtggtgtcctgacttccagcccagggcctcccatctgacaaatggagaaacagaccaggagagaaagggatctgcccgagctcacataggcgcccctgtgtggaggggcccatgtagaggggcccatgtggaggggacctgtatggagggtggcatgtggaggggcccacgtgtggaggggcccatgtgtggaggggcccgtgtggagggatcgtgtgtggaggggcccgtgtggagggatcatgtgtggaggggcccatgtggaggggcctgtgtggagaaatcatgtgtggaggggcccatgtggaggggcctgcgtggaggggcccgcgtggaggggcccgcgtggaggggcccgcgtggagggatcatgtgtgaaggggcccgcatggaggggcctgtcggtagggtgccaggtagaggggcccatgtggaggggatctgttggagggtgtctgtgtggagggggcctgtgtggaggggcccgtgaggagggcgctgtgtggtgggacccgtgtggaggagcctgcatggagaagacctgtatggagggtggctgtgtggaccactgccctctgccagagaccagattgttcacttcctccaccattccacagctccagccccatttcaggggtgcagaaaagaggcctgaaagcagcatggatgagagttagggctacaggccctgatggccattccttccctgtgccttgggagatgcaaggaaggagggtggctgcaaaggcctgtgggagcccagagcactgttcttcccaaaggggcatctgccctgggagcccagacctcagtgtcagacagagaaggggtccccccaccatgctcagccctcatcaacccttgaccttgagcaatctgcttctcttctgtagccctcagtttcctcatctgcccaagggggtgataagagtccctccccacaaggtaggtttgcggattgagatgatgcctaagctgtgcctggcctatggggaccctcacctaccctcagtcattgctcttgcctgggcctgcgggtgacactgtgtgaacctgggcaaatgcctttgccttcctgggcccagccttccctctggtcaaggaggaactgggtcagggaccccgagtgccagccattcaggaaaccagcagattcctgggtgaaggggttggccagggaggcctgagatgggagtagggtgggggccaggccaagggatggggttgggggatgcgctttcccagctctggtggccctgcctgcagctggccacccctggaaatccccaggctaaatttaaccccaagttggctgaaaccagaactcagagtgacaaaaggagaaaaataagaggaagagaaactgagctcatggccacccgggcatgggatgagtgacaaacaggcccaggtgtggcccaggaggagcatggggcagtttcagggctgctgctggatgtttgtgcagctcacaggtgggggcagtagagcctgcgccccaccccaccccctcctagtccagcccctgggcctgatgctgccccctggctgcctccccacaccctgagctccatcctgggtcccagggtccaccagaaggcatctcagaaccagccagcagtggccctgattgtcagcaggaccccagggaggggggtggccaggacagggctctgaagcccccaccccaggaccttccctgggcagaacgagttggtgagggagtgatgagcaaccacaggcctcctaacttcccaagctggcgattctgagaggcctcaaggctgagacacggttcagccttttaggccctcctgaacgtgtcccctgtctccacagcctgggaatgcactctcttttgacccagaaatcctgctcataagaatttatcatggagatgccagagggccagtgcatgtggatgttagccagggagctaagagcaaaacgtgacagaaaagagcccgagagcagatgccagcctcacatccacatccccagatggccttggagaagggtcatagacagatgttcacaacagggcaagaagaagtgaggaaagaagttcccatctttgtgataaccccatgatttcatgcagaaaaagatctggaaggcgccataccaacgcgctaacagggcctcttgggcagtgcaggatcagagacttgctttgtattcttatttaatttttcctgttttcagattttataatcggagaacaaaacattaaaccaatttaagatgtaagatcctataaaaatgctgtattcgatgatgcgaatggcatctgaaaagccttgaacatattatcccaaagaggccaccagataagacgtgacctgtgtgtgcatgaatccctgcatttttatccatacctagatgcacatccgtatccacatctattccccggggctaccggttgcgggggtaaactgtaggtaatattggttttcattttgtacatctaacttttttcattttttgacaatcattatacatttattattatgaaaaatagaaggttttgtcacttaaatcaacatgtttattccaattcacttaacattcagcaaatatttcttgtgtgtctgctacacccacaacagtcagggtgcagggtttgagattacactgatgagaagacagagtgttctctcttgaggagtagtacaatgggggattatatggaagaggtcactacgatcctaacatggattcgcatcctgtatgtcttaggtgctgcccaaagcccgaaattgtctcacagctccagccagctcagaggcaggaagcccagggaaagttgccgagtcataaaaatggaaagagagggcattccaggggggatgagtacctagcagccgacatttagcaaagaggattggaaaatgaacccccccttaaaatacagttaaacacagaggagggagcaactgcaaacaaaaagtttaagcgatttctgcaaagagcaataaaagccatagagcagcttgggacaaggtcaggtcaggatgagcagaagttgggaaggaaagaaggaagccaggatggacttggagagtttttaccagttcctcaggcaggaagaattgtatggtaggtcagagcatatttctaggaagacctcggttgacaaatttctctgccactgagagatgacaatttaccttggtaactaatctctctcctcatgttcccatctatttgatattgatttaatatgagtagctacctcccatgtgtataataggaaatgtatgggagaatgcatattaattcctgaatagaatatctggttccatgaatgatggaagttggttagaatttattattggaaactcaccctgcactacctatagttggtttattttaattatacttatattcattatatagtaactcatatatatttgtcatttcttttcttatattcaaaaagtctctacataaataaactctgcacctatggtcattgctgggtatctgttctatacacagcaaggagccagacgccctatcttacttgttcactttccagcttctccttagaaaaaaaaatacaagtttttaacccaattctatgagtctagtactgtgacccaaaacccaaagggcaggaactcaacagccacctctccatcctgcctgcctcccaacccacattccccttccagaaccctcactgatgagggaaaagatgatgtctccaagaggagcagcccgttcacacatcttcaagcttcatctccccagcagccatccaagtgcctgaccttcaaggctctcaataaacagtctgaatgaggaaagaaagggagggagggaaagaaggagggagggagaaaggggtaggtggatggatgtatagatgggtgagtgattgatgggtggattggtaggtgaatggatgagtggatagttgggtgggtgagtggatggctggatagatgaatgcgtggactggtgggtacatgtgtgggtgggtagttggatgggtgaatagttggataagtaggtaaattctaaccatgagaagcacagattggtatctggcaactctgtgtagagattagattccaattcctgctctgatcctgactcgggtgtgatcttgggccctttccttaatgtcttgaagccttttcccttcatctgccctgcccatctcacaaactgctgggaagaaccctggaaggacatatgtgcacgaagatgctttagaaaccctagcaagcttctcaggtgtgaccttagcattggagggaacttgaaggtcattgggctgactctcccgatggttggatcacagttcatggtaagagcctaagcttagagtccagacagacctgggtttgtgtcctggctccaccacttgtccgagtgtgactgtcctgcctgtgtactcctctgtgatgtggaggtgatgatggtggcagcttcccctcagggctatgtgaggattcagtgggatcatcgtggaaagccctgggcacatcacccagcaggggtgccacgacgaaacccaaggtctgccctccggggtcccaaaaaagaggcccagtcttgcctttccagagcagggtaccctagaggccatgggattgaaggagagctctaggatgtccagctcacgggttcacaaaaccctgaaaagtgtctgtataaatgctcattgcagggaaagatctgtggctttatacagaaagaggccatgacacataaagggttaaccacagtccatctaatccaggactctcacttaggaaactgagacctatgtcctgtccaagggcactctgtgggtcaggggacagcaaagcacagacattcaacccagcatggaggcccctccccacccaggagcaggagcctgccttggaatgccagacctgagataggattactgccacctgggaacagcatacactggtgagaggcaggggcagggagaacaccaccacaggggcagggagaacaccaggatggggaaagggaaccacagggcctactcttttaattaagcagtagaattgtaagaaaattgcaactttcttttaaaacctgtctttcaaggttgttaaaatggggttttaataacaaaactgtgggagaaagaggtggctgatgtcaaaaacatctcaacccactcccctgggggacctgcagttctctagttcgtgagtttctgctaacaaaaagcacactaaaagaggggccaaaacaaatggaaatcaagcttatcaaacacagatgacatggagttgaccaaagcatctagagctgagattccaggaagcagatctctctcctttctctgggaccatcctaggagaggttccagggccccctggcacagaggtgccaccagcgacctcaaacttcaggcgcaggtgggggcaacaggcgtagttgaggctacagggacacaggtgtcagcacagcatacgagagggccaccttgtttgttttctgacttcctcttaaaatacagtttatcgcccttgatctttagtttcaaatagtaactattcacagtaaacaatgtgacacagtaaacaacgtgtacagaaaaacaaacaggagaaaacaatttgccccttgtacttcacccagaagagccactgctaatattttgatgtatttccttctattttagttgcaaactgtaacaaccattaaataaataaatacgatgaatttgtaaagtttacagagtaataataggagtgatgattgcacaacatcgtgaatgtactaaatgccactcaattgtacactttaaaatggtgaattccacatgatgtgagtttcacatctattagcctcctgggctaggaatactgcctagacctcaggaaccacggaattcatcatctctttccttttccttaaagtttgacctcctgtgtgtgcccttcaacaaacggtttttcagcttgtcctgcttttgaacttcatacggattgaagaagaccatgtgtatttttcatggtttgcttctttctcaacactgtctctttgatattgatgttgatgaattactcatttcactgctgactagaagcccactgtgtggaggtcccatcactcagctgtccactctgctgccactgacacatgggcagttttgcccaggagcagggcatcagaaacacccaattggagtccagtgtgacagtttgtccagggcctgtcattgtacaacacatcatttcactttgtttttcaaacatagtgaattctttcctaattaaagaagaaaagagtataaagagaaagtttccagtgcagcctggagatctgtactggttgtatctggaattccagactcagccttgcatttcacatagcagatagatgatgatgatggagaaggagaagaagaaggaggaggaggaggaaagaaggaagaagaagaagaagaggaggaggaagaagaagacgaagggaagaagaagaaggatgaggaggaggaggaatagacagactgacaaagattctctactgttgtcacttaacaacatatccatgcaggtgtggataaacctgggtgcgcatcacactgggaacaagcagctccaacaacactgaggcagcctcttcccaagtcagctggacaattaggctgctttgctcaggtcgttcactgttctgagcaggacacagccaaagcccctcgcccccacctctgtgcaaggatccagtgactgacttggggttgaccctctctgcaaagatcaaaggtcatgcctgtctaaggccttggacgcatgtcccagactgacttccagaaaagagagcctgaactgccctgctgagtgcccaaagaggcccccctgcatccacgaaaggtacccatgagggtgtggaaggagaggcatccacaggaactgggctcccacctgccccacctgaccccagctctacactgagaataggggagatagaggggcccccagggcctcctccaaactccccagagcatccactgtgaggtgacctgaaccaggccccaagctccctcctcagggaggcctcagactcctccacctccgcagcctccaccgtggctgctctgtgtctctctctggcagcaccaaccacccccactgctactgacaccaccattggagaaggctcagggctatgagttcagcctctggctgctctggagatctagggaggcaggagggctgcaagtgggggctgggagagctattccaggtcaggggtctgtgggctggagtctgtgaggtgtgcacatgtggggctgagggatggctggagaggccctgttggtggccactgtctccaccttcagagcccaggaaggagatttggcccctcctgcatcagataatccctagctccttagttcccaagtcttcagtccccagcctggctctcctggggtggctgcccttgctgtgggaggctggggggatcttcagcccagcacctccagcagcagggcctggtgcccccagctctgcactggcccaggtctcagatcctgggctgtcagcccctcatgggtcccaggtgcccagcccagctgccccaggaggcaggggggtctgggggacaccaaaagagtcttagagaatggacctcaccactcagccacacagaaaaactgaggcccagaggggacaaaggacttgtcatgggtccagctgtgagcctggctgccagtcttaaggcccagtgctcccccacaggatgctgtcacacacacttggccctgatgaggtcccctcttagctgggatccagccccatgaccagcaccccgaggctgcaaagggtgctgggctccagcaccccaagactccacattgaccccaagactccacattgaccactctgagcagaggagcccttgggtctttggggaggttagagagctggcacccccaccccagtctacccggccccggggttcctctctggatagggggccccagtgcagttcacacaggccctgcacgtgttccttcctcagggcatgcgtggctgaagcttgctcaacactaaacatcccagcccagtttattgaatgtgagggatacgcagggtctgagcagagcagccatcccctcctgcctcccctccttccagcgctagagccagagtgactccactgtcctgtgcccacccccagaccaaggagcctcaggaccactcttggggcagggagctcgaggctataggaagattgccccagagcaggatggctgagtgttcaggagtccagccatgtggtaaccgtgcactgcagtgtcacctgaacagggatgtcaccacgtgaaggcatcccagctgcatccttggctgacatatcctaactgtgcctgtacaaggggctccacacacacacacatccacacacacacacacacacacagtcacacttacatacccattcatgctcacacatttatccacacacattcatactcattcacacacacacacgcattcacacactcacacccactcacatgcactggccagagccagagtcgatagcgccctctagtggccactgttgtcccttctctagaaggtctctgtcttatcagtcacaacccccaggagtcttcatccggaaatcccaggatgcacaagtctggcaagatcattatctcctttcacagagagggatgtgacctggccaaggtccctcatcaggaaagtggtacagccctcccctccacccaccaccaatggtccgggtactcagattccgaataactccagctcctgaggccctgtcagagcccagaggctgggccctctcccaagggaggggctggagcagaggatctgggggcccttgtacacccacctgtcacatacacagggtgcacggtcccccgggagggaagaagacaccttgggggagaggaatttccaggccagagagtcccagaaacggctctcctctgtgccaggtgggacggggtataggaggggagggcctgcctgggctttaggaaaacacagaaatgccaagaacattgacacacagcagtaacaaatgctagcctgctgtcaactatcacaggcttttactgagaggaaaatacaactgatcaggttagattcccctccgtttccctcccccttttccctgagagaaacccagtgctgctcactccacatgcagccattcaacagctctggatgtggctttatgcccaggggacccagtggtggcctcgggggccaagccctggaaccaagtgccattgggtgacataggcctggaacaaacaccacgtgatgctgtcatttgtgatgtgatgagttctttacgaaaaagacagggtcaaacgggagactgtgacaactgctggtttagctggatggtcaggaagggacacccctgagtcaatgaggggaccggccagttgtggaggtgcctggggaggagcgctcctggcggcagaaacagcaagtgcgaaggccttggggtgagactctgctgacgaattgcagaaacagcaaggaggccatgtggccagatccaagaagagaggaggggtgagggagggaaggggtagagggagctgggttgcaggcgggggtgggggttccttggggccttacagaccatgctgagcagtttgcatttgttctcagttttcaaatgcacctgaacaacatcatgtggaacctgtcacgctccttctaacttgctacatgtatatctctagtactaggagatgcaactagataaataagacagagctccatggttcaacatacaaatagacgctggtcccggcccatccccagtggatggacatctgggctgtctgggttattcattcacaaacacaggccagtgagcccctgcatgtccccgtgcatacatcatgcctcccaaggacacacactcaccctgtaactagagggacacacgtctatatttgggtttactatgaactgagttctccccagagcagccagactaatgcacagcccagcagggccaccatctcatgccccacaaccacaccctgccttggaactgtggacgattgggatgttcctatccccagagagcacagacatctggcaccaaatgagaaccaggtaaagcccaagggcgaggcccagcccgccgggcgtcactcgaaggtcaccagaccctgccaccctgatgcccattctgctcctgcctcgttgaccttggcctccctgagcctcagtttccccatggttttattcagaggttgcagtcctggtccctactcttttgagtctgcacagactggggcccttcccagcactgctagcatgggggcagagacccttggtggccgaggagggtgaagtgggccaccggagccgggatgggattgcaggacaagagggggccaccgggttgggtagtgcgacccccggaaagcacagggagctgtgcccctccacaggattcccgccctcagagcccctcccctctgtgccccagagcagaagctgagcctgggctgtgtccatggtagaggaaatgctccctccattgggaacagcgtggccggcttctgggcttggggaaggagagggagaattctgggcgggcgatagaggggcccaggttccctctggtcatgaccttgaagttgcccaggtgaccaggaaggaggagggtgctcctctctgtcaagaagatctgagcttctcttccctagaatcagctactcttctatccccctaaaaatgtacaggaattttgcacgttgaatgaatggatagtttactaaccagtttgggaagaattgacacctttcaatccatgaatatcctctgtctttcccattagtatactttaataattctcaagaaagttgtacaattttccccataaacagcttggacatctctgtagatgaacccctagtttactgatatacatttgttgtgagtttttgcagggagcgggtcgggggaggtgtttgtttcggttttgtttagagacagggtctggctctgtcacccaggctggagtgcagcggcacagttttggctcactgctgcctcaaattcctgagatcaagtgatcctcccacctcagcctcctgagtagctgggactacaggcatgcaccaccatgcctggctaatttttaatttgaaattgttttggtagagacagaatcttgctatgttttccaggctggtctcaaactcctgggctcaaacaatccacccgcctcagcctgccaaagtgctgggattacaggtgtgagccactgtgcccagtccaactgatatttttaatgtgattgtaaattgtatccctctttaatattattttccattcatctgctgatgtacaaaaatatattaaataataggcttatatatttgaaatcagatctggtaaatttgctacactttctcatagttctaaaagtgtatctgtgcagtctgtaggatttgctgcacatttaaacatgtcatctgtgaatggtgacaattttgttgccatcttctcaattcctacacctttcatttttttctttcaccttactctccctgctggtattcagtacaatgcggcatccttgtcttgtcacaaaggatgtttatatacagttcactattaaacacgatgcctgctgtaggttccttgcaggagtctctcaccagattaaggaagttattttacatttctcgtatggtaagtagtttctgaaaatcattcttcagattttattcaatgttttttctgcatcttttattgtgatttttttctcctttaatattgcaatttgtcattcttctaatgtcaaaccgattttgcatccttggaatgcatggaccagacttgtccattatgtactagccagcactatatgtggcactactgtgattaaggcatcgtttattcttcagaattgttttattctctggaggatcttgtgtaaggttggaatttcctaccagtgaatctctctgagccagttttggggttgtttttgtttgttttgagacagagtctcgctctttggcccaggctggagtgcagtagcgccatctcagctcactgcaacctccacctcctgggctcaagtgattctcctgcctcagcctctggagtagctgggattacaggctcgtgcaaccacactcagccaatttttgtatttttagtagagaagaggtttcattgtattggccaggctggtcacaaacccctgacctcaagtaatccacccacctcagcctcccaaagtgctggaattacaggcatgagccaccgcaccctgcctaacccagttttgtttgtgggaatatttgtcactatgtattcaatacccttagaagaactgagattttctacttcttcttgagtcaaatatatgtgtttgattagatttttctaagaatactctcatttcatctcaaagtactggcataatgttgttaaaattgactctattacccattttaggtattccacatctataaaacaaccccccgcccccagccctgtttacactcgatatgggtgatttgtgccttctttcttctgtttttattttgttttgttttgttttgatatagagtctcgctctgtcacgtaggctgaagtgcagtggtgcagtggtgcaatcttggctcactgcaacctctgcctccctggttcaagtgattctcctgcctcagcctcccgagtagctgggattacaggcgagtgccaccacacctggcttattttttgtatttttagtagagacagggtttcgccatgttggtcacgctggtcttgaactcctgacctcaagtgatccgcccacctcagcctcccaaagtgctggaattacagacatgagccgccgcacccacccagtcctttcttctgttcttgataaattcaccgaatcagtttcaatttctgtaatattgtaaaggaactaactgccactttcttgctgcatcatcccactgaatatatgatctacttctttaatacttgttcttccctttcttatttccttcaacttttcaagattattttactgcatttttctgagatctatgcatagctcattctttttcagcttattttctataaaatttctatacatattttaaggtaatcaatttccctctatgtactacattagctgtatctcacaaggttttcatgtaatgatttcattattgcttagttcaaaatgtgacctaatttccaatttgagaatctctctaaatcactgggaacatatttcctcatttccaagcatatgaggatgttctagttatatttttgtgactgatttctagtattttgcttacagaacatatgtggaatgttttggtcctttgaaatttgtttaggcttgttttacaggcccacgtatggtccatgtcttagtccatttgggctgttataacaaaatcccataaaatgggtggctcataaacaacagaaatttatttttcatagttctggaggctgagaagtctcagatcaaggcaccagcaggttcagtgtctggtgaggacctgtttcttagttcacagagggtgccttcttgctgtgtccttataagatggaagggaccaggcagctctctgaggcttcttttataagggcactaatcccattcataaggcccctggcctcatgacctagttgcctcccaatggccccacttccctaacaccatcacattaggtttcaacatatgaattctgggaacacaagaattcagaccacagtagtcaatttctgcccgtggtccttttctttttttttcttttcttgtttttttgagacggagtctcactctgttgcccaggctagaatgcagtggcactatctcagctcactgcaagctccgcctcccaggttcaagcgattctcctgcctcagcctcctgagtagctaagattacaggcatgtgccaccatgcctggctgattttttttgtatttttagtagagatagggtttctccatgttggtcaggctggtctcgaactcccaacctcaggtgatccatctgcctcggcctccaaaagtgctgagattgcaggcatgagtcaccgcgcctggccagtccttttctgcttgaagagaatatacatcccataactctggatgcgatgttccatagataagtccattagctcaagtcgattaagtcttctaatcttctgatatcttcttcaagttatttcaggtaatgcttcttggccataaagttttaaaatttgatgtcaacataactataccaatcttccttggagtggaaatttcatggtatctttttagccattctctatcttagcccaccattctggaaataggagctcttctctaaaaggctttcttcatgcatcatttctgaaacgtgcccttatattatgcaagagttgtgtctgttctccttgcatttccaacagtttagtcacatctctgtgatgggatttcttggccttttctgcacagtatctgaggcaggggcagcacagccgggcgcccctcccccatgcttccagagcacacatgtaacatctgttatagaccatgtcagagagccatcctgcaggtcccagaaacatgactcaaatggcctcagacaaagagggagttattgccttgcataactggaaatccagacgtggggcactcagagccgcctgaacccggatgcccagccctgtttctctgggattctctccaccctgtcttcatctccgcattggctggcttccctcatggaggcaaacagctccggcagagcagggcctcaccccatacatgaagccatccaaaggaggaggaggtcgagaccagaatcccaggagatgcagagaggcctattcctgatgaccaagaccagggctgaggcctactggccttcctcagggcaaccaggggcagggtggtgcaggcctcgggcctaggacaggcagatgatcacccccacccccatcctgccaggccagggacaatggagattcctgagcaagcacagctcaagaaccaaccaaaaattccagcaagaagaacacacttggcagaactctggggagatgcagcaggaaccaggtccaaggcctctggtgtaagggtctccccacctgagcatggggtgaggagtccatgctggggacagcacagcatcaggaagttggggctgtgggcagacctgtcctggctctgtctgtttcttggttcacagagggtgccttcttgctgtgtccttataagatggaagggaccaggcagctctctgaggcttcttttataagggcactaatcccattcataaggcccctggcctgacagccaggtccctgctctgtctcctgcctggagtcctgaggacttcccttgtgtccactctcagcctgattttcccacctccttgccaagcatgggcatcccctctgcccctgccctggccctgctgcagctgttacagagggaggagaccatgggatttgggtcataccttggtccaatttcaggtccaatcatttccaccagggatatttggaaagatatgtaacacctttcggggtaatggctacttcaagttcatatgtaccatgttttgttgatttgaggattaaatgaacatgtaggtgaatggcctgtcatgttactgggtacaggatatgggctcagcactggtcaccccttcccttccttttggttcagagacagagcctgtcccctagtccttaagcactgggggctgacctcacatacactgcagatcacccagagatacacaggccagcatccacattaggctgagcccagagggatggagtcacaatcacacaggggaaaaggctgaagaaaagggagggttgggccagatgtgggtggggtggctcacacctgtaatcccaccactttgggaggatgaggagcgagaattacttgaggccaggagtttcagaccagccctggcaacaaagtgagacccacttctctattaaaacaatttttttttaaaaaaatcagccatgcacttgtagtctcagctgcttgggaggctaaggcaggaggatcagctgaacccaagagttcaaagctgcagtgagctatgatcacacccaatgcactccagcctgggcaagagaaaagagagaaaaaagaaaacaagaaagagagcgagagaggaaaggagggagggagggaggaaggtaaagatagagagaaagatagagagagagaaagagagagagagagccagatagattgagagagagagagagttggctttggggcctgaagaaggcaggatacccattacaggacccaatcagagttcctccaccaaagtcacatgattgagcctttttaacaaccagaactcacgggacaatcactatggccacagatgtgcagcctgtgaaagatgagtggctgcaagtcacaccaccagccatgaacacaaagcctggtgggcctttatggctggaggcaagatgtgcctcagtggagtgggccacgtggacgcatctcccaagtcacacacaaggtggccagtgctgaatgggaacagacaatgagaagtctctgcagcaagcctaagctccagtgcaggtgtctcttccacttggaccttataatctggcacattcagtgaaatccagtatctgtggagagactgggggtgccacacggagcatctggcaagcagcagaagaatcaccgtgcagacctctaggacgtgggagcaagtctgcaccctcttctgcaggtgactctgcttcctctgagaaacagcttccgctcaccactgggccttggtggaaactaaatgcctacccataggacaccaggcaagcacccagcctgagcttcccaccatgacctgggtgccctgacccatgcagccaaagcagcaatcaatcaccagaggaaactgcctataagagcccaggctcagtcaggcccagaagggacaagcaagtgtcatgagcaggtggctcagatccctcaacacctgctcctcagactccatccagcctaaggcttcctgggctgttcctcaggaccaactgactgaggaagaaaacacatgagcttgattacagctgggtatgcacaatgtgctgctgatccctgaaggtgaccagctgcagcactactgcaccactcgagctgccctgaatgacacagggaaggttggcttgcccaggggctggagactgatgggggtatttcgctggcaacttggtctggattgagagatggcaaataacacagatgatggtgactcatgaggagttgctagaggtttggctggttggtcagggactcagaaggatcaatgatcagatttgaaaattaatgacaaggaagggtgggaagaggcatagggatgggcccctcattatggacactatgagcagacaccagcattgcatatgaatgctgaccacatggcacatgaacactctctgcagaagaggcctcgataatcaggtggacaaaatgacacattccatagatgtcagtcaacctcattccccagccatcccagtatttgcccagtgggcttgtggacagaggggacagtcatggtggcacacgtagaggctgtgcattacctcatgagcatggctgctatggcttggatgtggtttttcccctccaaaatgcatgttgaaatttagtccccgttgtggcaacgttgggaggtgggacttcatgggagatatttgggtcatgggagcagatccattgtgaatagattaatgcctttcctgggagtgagttattggtctcacaggaatggcttacttccctcgagagcaagttgttaaataagagagtctggcttccttagtttctctctcttgcttcctctccctccatatggtcactttgcctgctccccttccatcttctgccatcagctgaaaaagcctgaggtcctgaccagatgtagctgcccaaccttggaccttccagccaccagaatcataagccaaataaatggcttttatttataaattacccagccttggttattttgttataataacactaaatggcctaaggcagaaaatctccctcttcctaaggttgacctggctaccactgacaaaagtggccaatctgtcaagggcagagaccaacaccaagacccttatatatcattaatgtcgggggccagccagcctcctgctggcagattaattccattgatctcttctaccatggaaggggcacaaattctggatatggatttgccatccctgcttgtaatgcttcttccagcatcaccaaccctggactcctgagatccctggccaccatcgtgtcattccccacagtgctgtgtctaatcagggaactgattccactgcaaaggaaatgcagcatggaattaactgctcttactacatacccatgcccaggcacggccagactaaaagtggagtgacttactgaagactcagttgtggcacgacttgagagatggcaccctgaaatatggaggtcctatcttaagggtacagtctatgctttgactcaagaccatcaagtgacagtgttttaacggtgcctgggatatttttaaatcaggtatggtaagacatgcagacaaggaaatgactggtataaagaaaagatttgttatactcacagatctcaagaaaagggaacaaaccacgccacacagggccacacagagaagcagcagcattggtcaggaggcagaggggagggggagaaaacaggcaagaacctctgttgtggtttccactgggaaggaacaggggaggcaaggtaagcaggtttaggattggctagtttgaataattttggtgggctctggagcacaggaacaactagatacctacttgtctggtacctggtcttggagtgatgagggcaggtggatagcagcccagcctgtgagagcccaggaaagaaagtgcttcagggccgggcgcggtggctcacacctgtaatcccagcactttgggaggccaaggcgggtggatcacaaggtcaggagatcgagaccaccctgactaacatggtgaaaccctgtctctactaaaaatacaaaaaattagctgggcatgatggcgggtgcctgtagtcccagctactcaggaggctgagacaggagaatggcatgaacccaggaggcagagcttgcagtgagccaaggtcgtgccactgcactctagcctgggtgacagagcgagactctgtctcaaaaaaaaaaaaaaaaaagtgcttcagggtatgggttctggattggttggtttgcacaagaaaggctcactgtttgccatctctaagaattagctaaccctgcaaggggcagtgccccagggtcagcaaggccccagatgtcagatcatcagaaaacagaaaataaaagagcatggttaatacacacagtctccccaggagccacagtacatgggtctgagaatagatggatagaagtgagagtggcttcttccacaaataatcctcctaatacgctcaaataaggtttgcttgctatccgaacatttgagctctgctgctttgaagatcttagttcccaagaatataatgcctctcccaggggacaccacaatggctccattgagttggaactaacagtcagaaacgggggcaactttactggaaggactgattggtgctaacgaggggaaattgggctgctgtgtcacatagtgggggcaagaaggacttcacctagaaccccgagtactcatcatcttagtacttctgcctactcagacccttcaagaatgaaggtttagatcttcccaccagataaagatctgtaaccagctgaggttctagctgtggaacagggaaatatcaaatgggtagtggacaaaagaagtcacagatagcatctgtggctcataactagggtttaccaggtttagtaaacgaaaatacagacgtccagtgagatagtaacttcagataaacaacaaatagtattactaaaagtactatttgtatgtcctatgcaatattggggacatatttatgcttaaaaatgcattcactgtttggacatcctatattttatctggtaattctattcatgaccaagtaaaaaagcacatttttttactttgcttgtcatgtgtggtatatgtatgtatttggagttattaaccatttatcttttcttattatgagttgttagcagagtattcagtgaaattgtgactaaagatgaagataaactaatatagttagctgtggatgcagtggctcttgggagcctgcatctcgcttggaggagagggtgagaatttcgttcatataaaggataactgcttcttattagacggaaacagagttgttttttggttcctcagaagttcaaatgtgtgtagaaagataaatacggaagctaagtaggaaagcgggtgaactctgccagttatcagcggaatgttctagctgcaaattgcccctttctcgcaagctctaggaagccggctggtaaacagcgccctcctttgcccgccgctgcaatgttaggctttgccaaaagagagcacctgggggaagctgcgaggccaccgcggcgagaaggtgctttcctgtttccctgctgtcctttctttttattccgcacagaagccatatatatatatatatatatatatatatatatatatatatagtgtacatttatatattaggcttttaggccatatatatatgtgtgtgtatatatgtatatgtatcgctacatatatatactatatatacatatatactatatatactttctacacactataaatagatagtgtggcacatctatatattacacatttaggctctttatagatatgtaccaccacatatatagtgatacatttatatatatatatatatatcgactaaacagcatttaggctgtttccagctttttgctaccacaagtaatgcaggaattagcaaataagatcttccagataatacccagaggcaggactgctggatcaggaggaatgcacattttcagttttactgccctctaatgtggctgatgaatttacaccctactagcaatgtgtgggttctgtttctctaactctttaccacacttgatatcagcagacttttccatttgcaccacgcagctcttactacaaccctcctttacagctctcaactaacccaggcaggcagcatgcgtgggccagacaccagggcagtcctccactgcagttagatattgagtctccctcctgtgactgggcagacgaaaaggacttgttcactcttgttttctctaacacagcgcttcacacacagagttcttttccagttatgtgactaattcaataaactgcctgagccttagtttcccaatccttgtcattaaatggtcactgtgcccactggtgtgctgggaaaagtttaacaactaacagagtagcaagggcggtgggagtcctaatttgtagcatttgcccatttccatggtataaataatcccaccatggctgatttcaagctaccaaggtgccccactgaacacagagttgggaagagatgctcttaaatcatcagctctcctgagctggtgcaagccagttgcgggacaccactgggctttttgcaaccctgtttcttaattctcagttctgggcaggctgtagtcgcctccccgtgcttctgtacaagtagacagcgacatctggtggcaaagtcaagcaaatcccagaccatgtagagaagggcctagagtatgggaaaacaagaaacacccctcttctcccaccagcacccccacgaaaggttcctgtcctcttcctcaaccaaccctgggacccatcaactccagcaaaaactcaatgcctggggagttcctacatgggcagcctgcaggtctcccttcctgtggcagctggggtagagtggcatggctcctggtgttggaataagcagtgacctcgtacagcagtcattcccactgcctgcctgcagaccccttgccttacccctggttgagaattatcagaagcgtccctcaacccaaagcagtcaccacagcactcctagaacaagagttactcagctagtgtgaccagagcactggttcaccatgagcgcttcctcctggaatttggacaaccatctcagggcctttctttggtcaatttccttctgattctgtgtgtaagacttgtgtgcagaatctcagtggcctaaatatctcagcctatggtaggataggcggggaagtgagggtggcccctgcaatagcaaagccattacacttagcctttggccactaaaaccccctatggcagcaacaggctgctgaccaccgaacgttcacctccttttccatagtgtattccttttcttgagacagggtctccctgtatcacccaggctagagagcagcagtgcatccatagctccctgcaatctcagactcctgggctcaagtgatcctcctgcctcagcctcctgagtagccgggactacatgcacacaccaccacacttagctaatttttgtattttttgtagagatggggaatctcattatttgcctaagctggtctcgaactcctggcctcaaggaatcctcccaccttggcctcccaaagtgctgggattacaggcatgagccaccacatccagcttccatagtgaactgttaaagaaggcatctgtttagcccaggactctactttccatatccctaaaagggcaatgtgtgaaaagattatctgtgcaaatataaagtccctggctgctgcttctacagacaagctcctactgcatcctcaggcaatcacctttccaccctggggctgatcctccagacctgcaccagcccacccacatacccctgggcaatgataggcccttccatggaccagcttctgctcacactctctggcaagcgtcttggcctctggcaggctacagctcacagcaaaaccatgctctcctggaaaagtctgaatctcagccttgcctggggtcccattctcaagctcttagttccttcactcactccgcgtgagtcggtagctgctttctgaatctgctactcatgaacgttgtacagtcctgctttatccttttcatgagctcaccactctttatagtttaacaactctgaaaaaatccctgttcaaattactggtgtggtttgcctcctgagtctaccctggttgacacaatatctcagcatcaaaagatggcatggaaatgaaggtcatctccgaactgctactatgatagaccttcaatcaaatgaagtcaaatgaagccttcaggcattcatcttgcagaatgcaaacagtcagctgccacagggaactgcagaaggcaagcgttgtgaccaaaccataaatgctggtcagccccatctaaatcaggttaaaatggggatagatatcagccagtgagaacacaggcagctttctttggaatggccacttcgggggtggtgggtgagcaaagaatggatgcagatgctctctcctctccaaggagcaatgtggacttcaaagcccacaaagattcgtgagatttattcctagaataagtaccctagagaagcccgcccagcagagtataaaagaaatcaagaatttccggtggacccagaacgtgtcacagcttggggccaaataaattacactcctgcaaatgcctcgggcctagctccagtaaaaagtgacaggacagccatgtgtccaaaagctagtgcattgcacagcaaggaggaaaccaatttcctttagcctttgctcccctagagacgtcatatgaccagagtgaggttggacactcagctctctatcttttcaaataattccccatctccaagttcatggaaagagagaaaaccatcatgtcaccatagcgatgactcctctaatgatggttcagagtggaaaacttctgacttcaaggatggcctcatacaggatggacgtgaatgctggtcctcaaaaccccaatgtcacatttttaaaaatctgaccatccctcagtcagtgtcaggggttttcatgtgggaaacctcaaagaaggtgagaaggcaggggaggtgtaacccacagtaattattaataaaaccaacattccaggacaaactactgctaaggaggttgaattttttttctaaatgatccttcacaagtaaaataaggaactggagtccttggactgatcgctatattatgctaaatggatgacagaatacagctcaggagtcaaagatcataagcttccaagtggccacagggacaataagcctttcagcccttgggtaataaagtcagacaatctggtccagcagccagaagatggctgagctggaggaacatcgatgatgggacagtcccagcgtccgccctctctgctggaaggacattagctgctgagaataactggatccaaattgttaacgtgaccccccactgctcatggggatgaagaaaaagatctggggtgattggaaccttacaaagcagggacacagatgctttatgtctttcgaaggtctagttgtaaaaacaagacccgaaagcagcctctcggtcttttcactgctggccagcaaaactgggagaggactatgttgtgatgtccccaggatatccttcatgattgccaccaagatctgctgggataggtgcccaagacctggaaggaacactaaactagagacccagggatgcacacaccttgcatgttctcacaatgaggctaaaccagactcatcaccgaagaaatgccagccaacagcctgtggacatggatgcagattgactattccagcccctcagtgaacaagctccaagtgtgtttccttgtaaagcagttatacaggtcaaaaatcacttcatcacaaatgaaatacggtcaaactaccacaaaacacagggctaaaatatctcatcaccggagggtgccagagaccaccaaatataatccagattcaaggcagtccatgtgaaaattgcccaccaggtggcggaaatgcagggagacggccagcatgtacagataatttgtttcccgggtccacacattatctgatgagagtgaatctgaccctagaagagaactacacaactacttggttgcattagggttcaacaagactgtgcacgctccaaaaattctcaaaaaggtcaaatccaagtaacaagggttttagcctatgaaccaaggtgtggctagagaaaagattgtttgaatttgaaaagaagctaggaggttgactcactggggcatctatccttgagtcttcctgcagtgggaggcagagtgagcggtcagctgggcatccacatctagagtgttgaaaacctcctgggggtggagacgggggacttccacttccagaatgggcaattgtgtgtgtgtataaaatatttaagatatatgtatttatttaaagtctctagaaatggccttagggcatacagcaaataaaaaaacatttaattcaagaacatctattaaaacctggcaagaaatgggagggtctgtggcatttcaaccacgacctgctccattcctcccactgccagcaaaatgtgacagaaactccactccaggtgggtacagccaaggacacagcactgtctccacccagctcccagtcaagggctatggtattttcccaagaaggaaaatccatcagcatttttcttcccaccccagctacctgttgcagagactaaattccaggtgattgtagtaatcggttgaggctctcttcttttgctcagcccctacttgtgggacaaaagccctgccttgggtgcaacacactgagaatactggcaccatcaaccagctcatttgtaaagtagaggttccatgctatgagaagcaagctgggaatacaatagactctccaataagcacccacctcctaaagcaggggtgtcactcagaaagtagctacctaccactgtccccacccagccccagagccatagccaaaagctcctgaaacatttccccaagaggaaaggcaggacatagagagctctaaagcccttcccgaatgaactgactttatttgcaaatgagtacaaagttcaacattaaggggactttcaaaacaatgaagcttgggcaaaaagcaattgagaggaaactggtaagttcattagtgacataaactagaccataggccagctagtttatcagagagaaccaggaaaagacatggctaaaaacagacctcttggggtcaaagcaaacctcaaacactgacctcaaaaactatccctgcaaatgagcctcagtttaattggataagtcatctcaataaaggtgttttttaaagaaaaaaaacagcaataacaattatacattctggtcaacatggagtaacaggagctggatttatttttaggcctggaataattttaaaaacaacacaaaatatttaagtcactggacatcaggcaatgaaagatagtggtttataagagatgagaaatgaataagatgagccccacgattgccccagattactgcatggagagtttccagtctgaggctcaaggaggagagaacgtaaccacagcccactggcctccccgagttgaagaaacagagctgcttgggatcccaggccgctggagttcatagggcagagtaccaaagaggagggagcttaacagaaagagaactctgcaaatacgagagtgtaagtattatactgagtagtgatcagtgtatgcatatgaggaatgtacctgaggccaagaaaaagactacccaaaagcattgaacagaacaatccccagagaaaattcagggctgaaaataatgcctgacctcatcaacaagtacagaaaatctcataattcattaagcatcaggtagagtactcagaggagtcttcctgatctgtggacaaaattaaccatagacttaatgctgttgtggtctcatgtaaaaatgttaaaagaaagctggggatagattaaactgtttcaaaataatttaactgtgtaccagaacacaacttaagaatacaaaaatatctagcacctgcaaagataaaatgcacaatgtctagcattcaactacaaattaacatgcaggcaaagaagtggaagaatatgatccatagttaggaaaatatcagccagtcaaagctgatccaaaattgacataggtaataaatagataaggtcattaaagcagttattataatactattccatatgtataaggaactagaggaaggattaaacatttttggcgaatgcacagaaggttttttctaaaaccaaattaaacttatagaaaacaatgtgatgaaaaatacactagatggaattaatgacagattagaaactgcagaagaaaagattagtgaacttgaaggcagagcagtagaaattatacaaaattatcagagggttaaaggactaaaaaaataaagagaacatcagtgacctgtgagataaatgccagtggtaaaatatatatgtggttaaagtctctgaaaaagaagaggggatttgaaaaaataatgacagaaaattttcttaatgtgatgaaaactgtatacctacggattaaaaaagttcaaccaaccgtaatcacaaaaacatgaagaaaaccataccaagtcacactatgatcatcaaatttcttaaaccaactcatctaagagaaaattttaagtggccagaagaaaaaaaatacattatatgcagaagaacaaagaaaaggatgacagcagatttctcagaaaaacaatgcaagtggccaggtacagtggctcatgccagtaatcccaccactttgggaggccgagatgagaggataacttgaggccaggagttcaagaccaacctgggcaacatagcgagaccctgtctctacaaaaaaaaaatttttttaattagctggtgtgatggtgcatcactgtagtcctagctactcaggaagctaaggcaggaggatcacttgagcccaggagttagaggctgcactgagctataatcacatcactgcactccagccttagcaacagagtgagaccctgtctcaacaaaataaaaaataaaagacacaatgcaagttagaagagagtggaacaatatctttaaagaatttaaaggaaaaaagttcatcctagaattatttacctagcacaaatatctttcgaaaaagaaggctgagattttttagacgtacaaaagctgaatgtatcattgaattttcactataagaatttttaaagaaagtcttcaagcaaaaagaaaatgacatcgcatggaaatctgggtctacacaaaggagtaacgaagggtgccaaaaatggaaactatatggataaatatacagacttgttcctaattatttaaatctctttaaagaatattaaactatttaaaggagaaataatgacattcataaattaaaatttaacatttataacaaatgtaaagtaaaacatacaacaatatcacagaggctagagaggagaaatgaagtacagatactgggagatcagttccaagaccacccaaggataccaaaatctaaggatgctctagtgccttatataaaataatgtagtatttgcatataacttaagcacattctcccatatactttaaatcatctctagattacttataatacctaatacatgtaaattatctgtaaatagttgttatactgcattgcttttattattgtattatttttagcaataaaatattttttaatttttaattttaatttgggtgggtacctaggcaggtatatgtatttatgggatacatgagatgttttcacacaggcttgcaatgtgtaataatcacatcttgtaaaattgggtatccatccccctgaagaatttattctttgtgtcacaaacaattcaattacactcttttagttatttttaaatgtataattaaattattactgactatagtcactctgttgtgctgtcaaatttattcatatccattctttttaactacttttttgtacccattaaccatccccacctccctctccccttcccacccccatctcatcctctggtaaccatccttctactctctatcttcatgtgttcaattgcttcgatttttagatcccataaataagtgagaacatgtgtttgcctttctgtgcctggcttatttcacttagcacaatgacctccagttccatccatgttgttgcaaatgacaggatctcattaattcttatggctgaatagtactccattgtgtatatgtaccacattttctttatccgttcatctgctgatgaacacttaggttgcttccagattttggctattgtgagcagtgctgcagcaaacatgggagtgcagatatctcttcaatatactgatttccttacttttgggtatatatccagcagtgggattgcgggatcatatggtagctctatttttagttttttgaggaaactccaaactgttctccatggtggttgtactaatttacattcccaccaacagtgtacaagggttcccttttctccgtatcctctccagcatttgttattgcctgtcttttggatataagccattttaactgggatgagatgatatctcattggagttttgatctgcatttctctgatgatcaatgatgttgagcaccttttcatatgcctgtttgctatttgtatgtcttcttttgagaaatgtcaattcaaatattttgcccatttttggattgcattattagatattttcctatagtcgtttgagctccttgtacattctggttatgaatctcttgtcagatgggtagtttgcaaacattttctcccattctgtgggttatccttcactttgctcattgtttcctttgttgtatagatttttaacttactctggttccatttgtccatttttgctttggttgtctgtacttgcagggtattactcaataaatttttgcccagaccagtgttctggagagtttcttcaatgttttcttatagtagtttcatagtttgagatcttagatttaagtctttaatccattttgattttgtttttgtatatagtgatagatatgggtctagttttattcttctgcatatggatatccaattttcccaacaccatttattgaagagattatcttttccccagtgtatgttctcagcacctttgctgaaaataatttcactgtaggtgtgtggatttgcttctgggttacccattctgcttcattggtctatctgtctgtttttatgccagaaccatgctgttttgttttatatagctctatagtataacttaaagccaggtaatgagattcctaaattttgttctttttgcttaggatagttttgacgatttagagccttttgtggttccatatacatttttaaattgttttttctacttctatgaagaatgtcattggtattttgataggaattgcattgactctgtagattgctttaggtaatatgaatatcttaacaatattgattcttccaacctatgaaaattgaatatttttccattttttggtgttctcttcaattcctttcatcagtgttttatagttttcactgtagagatcgttgacttctttgattaattcctaggtattgtatttgtggctattgtaaataggattacttttttatttcttttcagattgctcactgttgacatacagaaatgctactgatttttgtacattgattttgcattctgcaactttactgaatttatcagttctaatagttttttgtggagtctttaggttcttctgaatataagatcatctataaacaaggataattggactccttcctttcctatttgaatgcctgttatttctttctcttgcctaattactctagctaggacttccagtaatgtatcaaataacagtggtgaaagtaggcatctttgtcatattccaaatcttagaggaaaggttttcagtttttccctattcagtttgacgctgaccatgggtctgtcacatatggctttcattatgttgaaatgtgtttcttctatacctagtttttcaagggtttttatcatgaaggcatgctgaactttatcaaatgctttctcagtatcagttaaaatgattgtattttttttccttcattctgttgacaagatctatcacactgattaatttgcacatgctgaactatctttgcatgccaggaataaattcctcttggtcgtgatgaatgatcttttgttgaattttggttgctactattttgttgagaatttttgcatcaatttcatcaaagatattggtctgtagttttgttttgtttttttcaatgtatctttgtctgacttcatcagggtaatgccagcctcgcagaatgaatttgaaagtattccctcctctatattttagagtagtttgagtagaattgatattagttcttctttaaacatctggtagaattcatcagtgaagtcatcgggtcttgggcttttctttactgggagaatttttattatggcttcaatctcattacttgttattggtctgttcaagttttaaatttcttcatggttcaatcttggtaggttgcatgtgtctaggaatttgtccatttcttctagatttttccaatttattggcatatgattgttcatagtagccactagtgatccttttaatttctgccgtatcagtagtaatgtctccttttttatctctaattttattttttcttaatgtgactaaagttttgtcaattttgcttaattttttttaaaaacaactttttgtttcattgatcttttgtattgttttcttcatttcaattacatttatctctcctttaatctttattatttctttccctctactaatatggggtttcattttctcttgcttttccaattctttaagctgcatcttaaagatttatttgaatatttatttgaatattttttctttttttgacataggcacttacagctataaactgccctcttagtagtacttttgccatatctcatagaatttggtatgttgtgtttatcatttgtctcaagaaattttttaattcccttcttaatttctttattgacccattggtcattcaggagcatattggtaatttacacatatttatattgtttccaaaattgctattattgatttctagtttcattccattgtgataagagaaaatattatatcttaatattattccaatttttttaatgatttaagacttgttttctgacctaacatatggtctattttgataatgatccatgtgcttaggaaaagaatgtatattctgcagctgttggatgaaatgttcagtaaatgtctattaggtccatttggactatagtgcagattaagtccaatgtttgttgctttttgtctggaatatctgtccagtgctgaaagtggggtgttgaagtctccagctattattttattggaacctatttctctctttagctctaataatatttgctatatatatctaggtgctccagtgttgggtatatatgtatattatatcctcttgctgaattgaccctttatcattatatagtgacctttgtgtctcttagagttattgttttaaaatccgttttgtctgatataagtgtagctattcctgatttttggtttgtttgtttccattggcatggaatattttttccatccctttattttcagtctacttataggttgagtatgtttcttgtaggcaacagattattgcatcctttttaatccattcagccactctattttgtttggagagtttagtccatttacatttgatgttattattgataagaacttactcctgccattttgttatttgttttctggttgtttcatgatctcttccttcttaccttcttgttttcgttttagtgaaggtgattttctctggtgacacaatttaggttcttgctttctattttttgtgtatccattgtggttctttggtttaaggttactatgaggcttgaaaatactatcttcttacccatttttttaggctgataacaagttaacactgcataaacaaacaaacaaaaagaaaactaatgaagactgtacaccttaactttgtccccctgcttttttacttttgttgtttctatgtatatcttattgtactgtctatgccttgaaaagttgcagttattttttgtttgttcattgtttagtctttctacttaagataagagttgtacaccacagttagagtgttgtaatatgcttaattttctgtgtactttctgtaatagtgagttttgtaccttcagatgatttcttattgttcattgatgtcattttctttctgattaaagtactccctttagcatttattatagaacagttctggtgtattagactgttcttgcactgctaataaagacatacccaagatggagtaatttataaagaaaagaggtttaattgactcactgttccacatggctggggaggcctcacaatcatggcagaaggcaaagaagagcaaagccacatctttctcacatggtggcaggccaagagagaatgagagtcaagtgaaaggggaaacttctttaaaaaccatcagatcttatgagacttattcactataatgagaacagcatgggaaatatccgtccccatgattcaattacctcccaccaggtccctcacatgatgcataggaattgtgggaactacaattcaagatgagatttggatggggacacagccaaatcatatcattctgcccctagcacctcccaaatctcatgtcctcacatttcaaaaccaatcatgccttcccaacggcctcccaaagtcttaactcatttcagcattaactcaaaagtccacagtccaaagcctcatctgagacaaggcaaacccttctgcctatgagcatgtaaaatcaaaattaacttagttaattcttagatacaatgggagtataggtattgggaaaatacagccactccaaatgggagaaattgaccaacacaaaggagctgcaggccccaagcaagtccaaaatccagtgggccagtcaaatcttaaagctccaaaatgatctttgactgcatgtctcacatccaggtcatgctgatgcaagaggtgggttcccacagtcatgggaggctccaaccctgtggctttgctcctccctcctggctgctttcctgggctggcattgagtgtctgtggcttctccaggtgcatggtgcaagctgttggcagagaatgccacaaagatatcctcgggaagagcaaccccaagacacataattgtcagattcaccaaggttaaaatgaaggaaaaatggtaagggaagccagagagaaaggtcgggttacccacagggaagctcatcagactaatagtggatctctcagaagaaaccctatgagccagaagagagtgggggccaatattcaacattcttaaagaaaagaattttcaacccagactctcatatccagccaaactaagcttcataagtgaagaagaaataaaatcctttacagacaagcaaatgctgagagattttgtcaccaccaggcctgccttacaagagttcctggaagaagcattaaacatggaaaggaacaaccagtaccagccactgcaaaaacatgccaactggtaaagaccatcaacggtatgaagaaactgcatcaattaacaggcaaaataaccagctagcaacataatgacaagatcaaattcaaacataacaatattaaccttaaatgtaaatgggccaaatgccccaattaaaagacacagactggcaaactggataaagagtcaagacccattggtgtgctgtattcaggagacccaactcatgtgcaaagatgcacataggttcaaaataaagggatagaggaagatctaccaagcaaaggaaaaattttaaaaatgaaaagagcaagggttgcaatactagtctctgataaaacagactttaaaccaacaaagatcaaaagagacaaagaaagccactacataatggtaaagggatcaattcaacagaagagctaactaccctaaatatatatgcacccaatacacgatcacccagattcataaagcaagtccttagagacctacaaagagatttagactcccacacaataataatgggagactttaacacccaactcttggtattagacagatcaatgagacagaaggttaacaaggatatccaggacttgaactcagctctggaccaagcagacctaatagacatctacagaactctacaccccaaatcaatagaacatacattcttctcagcaccacatctcacttattctaaaattgaccacataattggaagtaaaacactcctcagcaaatgtaaaagaacagaaatcacaaaaaaactgtctcagaccacagtgcaatcaaattagaactcaagattaataaactcacccaaaactgcacaaatacatggaaactgaacaatctgctcctgaatgactgctgggtaaataacaaaatgaaggcagaaataaagatgttcttggaaaccaatgagaacaaagacacaatgtaccagaatctctgggacacatttaaagcagtgtgtagagggaaatttatagcactaaatgcccacaagagaaagcaggaaagatctaaaatcaacaccctaacatcacaattaaaagaactagagaagcaagagcaaacaaattcaaaagctagcagaaggcaagaaataactaagagcagaactgaaggagatagagacacaaaaacccttcaaaaaatcaatgagtccaggagctggttttttgaaaagatcaacaaaatagaccactagcaagactgataaagaagaaaagagagaaggatcagatagatgtaataaaaaagataaaggggatatgaccaccgatcccacagtaatacaaactaacatcagagaatacataaacacctgtaggcaaataaactagaaaatctagatgaagtggataaattcctagacatatacaccctcccaagagtaaaccaggaagaagttgaatctctgaatagaccaataacaggctctgaaattgaggcagtaattaatagcctaccaaccaaaaaaagtccaggaccagatggattcacagccaacttctaccaaaggtacaaagaagagctggtaccattccttctgaaactatttcaatcaatagaaaaagagggaatcctccctaactcattttatgaggccagcatcatcctgataccaaagcctggcagagacacaacaaaaaaacagaattttaggctaatatccctgatgaacattgatgcaaaaatcctcaataaaatactggcaaactgaatccagcagcacatcaaaatcttctccaccacgatcaaattggcttcctcactgggatgcaagcctggttcaacgtatgcaaatcaataaacataatccatcacataaacagagccaacgacaaaaatcacatgattatctcaatagatgcagaaaaggccttcgacaaaactcaacagcgcttcatgctaaaaactctcaacaaactaggtactgatgggacgtatctcaaaataataagagctatttatgacaaacccacagccaataccatactgaatggccaaaaactggaagcattccctttgaaaactggcacaaaacaaggatgccctctctcaccctcatattcaacttagtgttggaagttctggctagggcaatcaggcaagagaaagaaataaagggtattcaattaggaaaagaggaagtcaaattgtctctgcagatgacatgattgtatatttagaaaaccccatcatctcagcctaaaatctccttaagctgataagcaacttcagcaaagtttcaggatacaaaatcaatgtgcaaaaatcacaagcattcctatacaccaataatagagagccaaatcatgagtgaacgcccattcacaattactacaaagagaataaaatacctaggaatccaacccacaagggatatgcaggacctcttcaaggagaactacaaaccactgctcaatgaaataaaagaggacacaaaaaaatagaaaaacattccatgctcatggataggaagaatcaatatcgtgaaaatggccatactgcccaaggtaatttatagattcagtgctatccccatcaagctaccactgactttcttcacagaattagaaaaaactattttaaagttcatatggaaccaaaacagagcctgcatatccaagacaatcctaagcaaaaagaacaaagctggaggcatcacactacctgacttcaaactatataaggctacggtaaccaaaacagcatggtactggtaccaaaacagatacatagacctatagaacagaacagaggcctcagaaataataccacacatctacaaccatctgattttgataaacctgacaaaaacaagaaagggggaaaggattccctattttttaaaatggtgctgggaaaactggctagccatacgtagaaagctgaaactggatcccttccttctaccatatacaaatattaactcaagatggattaaagacttaaatgtaagacctaacaccataaaaaccctagaaggaaacctaggcaatgccattcaggacataggcacgggcaaggacttcatgactaaaacaccaaaagcaattgcaacaaaagccaaaatagacaaatgggatctaattaaactaaagagcttctgcacagcagatgaaactatcatcagagtgaacaggcaacctacagaatgggagaaaatttttgcaatctatccatctgacaaagggctaatatccagaatctacaaagaacttaaacaaatttacaagaaaaaaacaaacaacccatcaaacagtgggcaaaggatatgaacagacacttttcaaaagaagacatttatgcagccaatagacatgcaaaaatgctcatcatcactggtcatcagagaagtgcaaatcaaaaccaaaatgagataccatctcacaccagttagaatggcaatcattaaaaagtcagaaaacaacagatgctggagaagatgtggagaaataggaacacttttacactgttggtgggagtgtaaattagttcaaccattgtgggtcttaagaaagtgtggctatttctcaaggatctagaactagaaataccatttgacccagtgatcccattactgggtatacacccaaaggattataaatcatgctacaataaagacacatgcacacgtatgtttattgcggcactattgacaatagcaaagacttggaaccaacccaccaatgatagaccggattaagaaaatgtggcacatatacatcatggaatactatgcagccataaaaaaggataagttcatgtcttttgcagggacatggatgaagctggaaaccatcattccaagaaaactatcacaatgacagaaaaccaaaaccaaacaccacatattctcactcataggtgggagttgaacaatgagaacacatggacacagggtgggaaacatcacacaccagggcctgttggggatggggtgctgggggagggatagcattaggagaaatacctaaggtaaatgacgagttaatgggtgcagcaaaacaacatgacacatgtatacctatgtaacaaacctgcacgctgtgcacatgtaccctagaacttaaagtataataaaaacattttaaaaatcatccatataaccaaaaaccacttatacccctaaagctattgaaatctggaaaaaaaaaaaaaaaaagatgtcccttaaccacactatccagggccagatacagcctatgttccactggaaggtcaagtgagtatgaaagtttaggttgctgtcacttatgtcccctaagctgagctattaaccattagaggcctctgcctggcctgcatcaccaagcaggagtggctggtgacaatgccaccaaaacaatgccactaattgctaaccaatggtggagtttttattttgggtggcccctactcagctgaagactgcatgcccatgtgaccttactttggggtgtttattgggtcacggcttcttacagtgggacatgtggccctttgaagtacaatctttgggcaatctcgagggcttatgcatcactgcgcttctagtgggcagctgcagcaatggagctgtggactcctttcttttaagagacttttgtatcagaagagaaaatacaggccctttattccaaatgtaaagggactcctttatatctgagatttttatccagatcattcacataatttttaaaaattgtcctcagttattagaagcatcattctgggtggcctgggcaggggctctgaagattgagcacctgtttggggatctttcccttagtgctgttattgaattaggaagcccacacaaaactttgtcttggtcacactttgggtctatgtctggccaaaggcaaaggatgaatgagccatctggtcacttccagaggacacttgctgctccttcctttctggaagtcataaaacatgcatgcagatccagaaagctctgattcctttccttttttagattatctttcccctggttctttttaagaatcatacattgtttaaaaaaaaaaagaatcatatattgttaactacaaaagttttgcatgctcattgtaagaactgaaaaatgcataaaaccttaaagaataagttactattcttcccccatccattcctatctttctgaagtaaccagaagctgtgtatctttcctccccttccttttgtcttgtctttctctctcttctttttttttttacagagtcttttctctcttgcccaggctggagtgtagtgtgcaataacatgatttcggctcactgcagccttgaattcctgggctcaggtgatcctcccatgtcagctcccccaagtagttgggactactggtgcatgtcataacgtctggctaatacttgtttaattttttgtagaaacaggtattaccacgttacccagtttagtctcaaactcctggactcaagtgattttcctgccttagctcccctaaaattctggattacaggcatgagcttcctcccctttctcagtgcttatgcaaacatacgaacgcatatgtagaatttttgcattgtcttcacaaaaagtaggattatatcaaacacattactctgcagcttgatttttaacttaatatattagagtcctaaggtacaatagatacaatacaatagatacagacctagctcatgttttaatcagctacatagttgtcatacaaacgtgtactattcagctcttccctattaattgacacttagattgttgccaggtttgtttgtttactgtgttggtgcttttcatttgtgtggtgtggattcccaaaattgaacttgcagagtcagaaggacatgtttacattttaatagctatcgctaaatggcaatccccaaaggttgttgacatctgcatttcacactggcagcatatgagcatgcccttttccccaagctctccccagccttgacagctgcttgtttaatttgtgcatgtgccaatctgatgggaaagcagtgatgtctcgtagctttcatttgctcttcccaaatgctattgatacaggagttaagaagaaatcacttacccagatagtaagggtatggaactccttggtaaggcttttctcattaataaaaagcagccccaaattattttcttacaaagaacagcctgtaaattcaagctgcagccacagataagcaagataggagcttgcacaggtgaatactggcaggaactagggactagacatgttcaagacgacagctccatattcccttcactttgtcagccacgtgaacagtaaagagcagacaagatggcaccgggcaactggtaagctcagttgcataagattacttattatgcaatgctatgtaaacatcatacctgattgaaccaatctgtgagccttatgtaaatcagacaccaccttctccagcgtacttataaaatctgctgcggtccactatctcccgcttttcagacatctctctctcacaaggagcttctcttctctctcctttctcctattaaactctccactccttaacctacccacatgtgtccatgtcctcgattctttcttggtgtgagacaacaaaacccagggtatacaccccagaaaatgtagccatttcagttgggggttctcatctgggattgggatcagaacagaaggtagaatcattggagtggtaagtatggagtgaacctcaaaatctgtcctttcattctgaggctctcagcctgcattttaaaatcaaattaaatcaataacatgtatacatcagccatttaaaaatatgattatcatggctacccttcttaaagactcggatgtcaggcttactggggagaatatggaaaatcccccaatactcacaggtcattgggttcattggccatgctttgaacaagcttcctttcatggagaacctaactatcatgtgaggccagaagtcctggagcaactaaaagtttccaaccagggcacaccctggtgttattcaaaggtttctggactaacccagcttctgacagcccatctgggtgttagtaaaggatccgcagctatcttgttgcagaattttcctccttttcctatctatagtcgctatgtctctatcctctctgtgtgctcagtgtgtggaaagttttacagttcagggaagtaatcatgtttgacaagatcagggaatgtcgtactaaccagggatatagctcaagggaaggcaactctgtgattttctatgaacagagggtccccccacacacagtgagcatctctctctgcccttggtctggagagcacatggcatttccaggtctctctctgcccttggtctggagagcacatggcatgtcaaagtcactctgcccttggtctggacagtatatggcctttcaaggtccactgtgccacctagtggaatagggatcctctccacgaggcactttgtccgtccttcaccgaaacagcctcactttccaattctctcccctttttatgcctctctactagaaaccaggcttcatgctacttctgtaaatgggaaaaatctgctgtcaacaattaggagtaaaatatcctccaaaaccgaattttagtctcggtactgtcccatcagcagcaaaaatggccatttggtccttatgttctcttaaggcacctattctatctccaattagtatggcttccagtctcacttatctgcggccacctccaaccatgccaccagctcttccacctccaccatctccaaaatttcccactcccccaccttcactcttacccctacaggaaatgcccaatggaggtgatgccactagggttcaagttcccttctcattgcaggaccttagacaggtaaagggagacttaggccaattttctaatgaccctgataggtatatagaagctttccaaaatttaactcaggtacttgacttctcacggagggatgttatgctgctgctaaggcaaaccctaactgtggctgaaaaacaggtaactctgcaggtggcagagaattttggagatgagcaatatgtctcctataacaggcaaaaatgaaaaagagaaaatagggaaagtgaagaaatagggaaaacaccattgtcaataggaaggaaagcaatacttcttgacaagtctaattggaaccccagaattttctgtggtatttgaccttctttcacagtttaaaatggcttctatcttcttttataatgttcttccaacctgggaaaagtcaattttccaaaccttaaaatgattggcttagagttgagctaaggggaagagaacccagaagcctgacatgctagcagagtaaaaatttcttaccagtcagacttttggctcctctctccctgtgcaaaccagtaaaagggataataaggatcattgtttatattctctgtaaagttttaactaatgaaaaaggatttgtgagtttggtcttaagctgtagccaatctggtgtgctttgtgtgtttttctgtatggttctgtcaaaagaaagggtactttaggttaggttacagacacaggaaaccaaaagcctgctgttcaagcaagccaaacaaaataatcagtaacaaacttggttacaggccaccatcttgtttcatgtccttgggaacatgacctgtaaccacatggcagtactttgttttagtctctgccattttacaatggtggctgtcttcttgtgctaagtcaattcctgggtgagggccacaaaatcagataagccagtttgtcaatctgggtagtgccagctgatccatctagggtaatgtttataaaatatcttaagcactgatcttgagagcagttaaggaagggtcaaaaatcttgtagcttccagctgtatgactcctgagccatggtttccagtcttgtggctagttttttggtctggtccccaaacaagagggaagtatatcttaggaaaggactgttatcatctttgttttggactacaaacagtgaaccaggcccctcccaaagttggttcagcctacacccagggatgggcaaggacagcttgggggctggaaacaaaatgaagttggttgggtcagatctcttctactgtctcagtaacaattttttaaacacagtttcaaaagcgcttatcacccccttaaaaatactttgtacactcgcggttaagtcataacctaattaaggcttgttggcttcaactgtgaggttaatttttgtaaagttcaaaaaccaaaaattttaactccttggcatggctaaagttgagtaacaaaagaattaaaagaattttcttaaagaacactcagtttaattaaaagtggatattcaagttataggtatatttaaaagacctttatatttttctcttcttaaatttttctgggaaaagggtttttttctccatcaactgaattatttttctccattctttgtcttgacacttttaacacatgcacaagaggccctaagataacttctggtaacatgggattccttgggaaaaacagagaccacagactccattttgggggggaaaaccctctgttttcctcataaaaccccaggaattaaaagcagatagttccctctcaaaatcaaaggctctgtactattttgcattgtgttatctgacagttttaagtttgaggggcatcaaattactgcacattacagagacctttggtgtctaataaccaggtaaggaaaacactttaagggatggctaatagtagttataaatcagagaagcatgttattggccacctgaaagatatggaaatatccccaccccccactgagagatgaggctcctgtgggaaatgggctgattacaaaataagccaattgtctttgggttgccttgcaatgaaatgcatagtagaggcactgcacactgtcttctcccatagaatctccctccttttggggatccaagatccagaataaaatggcacccttaattttgaggatctgcctttgccttcagctgtgcttgcttattttgccctagaaatgcatgccttcctggcactgttcctccaagggctccaccctgaagcaagtaatccaattaagaaattggcaaatacaaaaatcgtacaagtgttgaatcttctgtttgtggtcgctataaatgtgttgtgtgtaatgtctataaaaagagctctaattgattggcttaaagaaaaataggcacttaagtcaaatattttttagttcatatgactttaatctttaagaaacaaaaatagtcttaagggttattggtaaaatgcaagtgtcatcaaaattcaaataggtggtctaaatcatacaacttagatactaggtttgctaaatgttccaaggttgtattactggttgctttacagataggtaaggccttggacacgtagagttagatactagaaagagtcaaaccttatctgtacttctatctgggtcctaggttccacacctggtaaataattacaatcacttactaaccaggtttttcaccaatgtaaaaattgctaagagttaacagcgcaacatgtatttgagatgactaaacagttttatctgcaaagtgtataaaaacagtaaagtatgtcttttagtaaaagattacaagaaagcatagaaatgtaaattttgcctagggataagggattatcttaaatttgatatgataaaggtaaaggtttaagtaagttgtggaagattgtaaaaattaatcttgcaaaaaatgtgtaaacattaactaaattcaaaatggtatcttatagtcttttcacagattgaacattgaaataaaagcacagcaaagctgtcttaagacaatcatcttccctttagcaaaaggggttataaaaggtttctatagatttcacctcatggttacattggttaagattagatggaattgtctatgaggtttcattagaaattggggtttaacattaataaactaatgcaagggaagattttggctttgaacaggatttccatgcagtagtaaaggctaatgaaaggtttttgctttttgagtcatcattttggcaaaataagtaatttacggtaatgtggaattctattttgtaacatcaagtgttttaaacctctaacacttaacaggcattccaaaatcaaacttcaagtttcaaaattgtctttcctgatgcctggcattctggatggttcagagggcccctgaaacattcagaaaagaggtgtacaggattgtttgacctgtttagtcacatgaaattgccaaatgatgtccaattctctttaagttatattttggtgaatactaatatatgttccaaaattgtatgggatttctaaaattctaccttctgagtatatgctatcaatcataattaatggtaaagttattgtaaaccatggagataactgaacttcatcagtcatgtttttaactgtaactaccctggaaattttgtcattcacggacaattgttgtcttgctttgttccttctcaaaagatggtttataatcaagctatattaaggactttaacacatgttctcgaatgcaggtttttaatagctttgaagattgtaacattggaatagagaaagaacatacaaggctcatgaaaaactgaaatgtttacaaatgtcaagcaaaacaagagttaactaaatggcctgccctcagaaagttaaagcaatgtttttgacttttgcttggaatattcctgatccttgttttgtttttcagagtcaaggaagcttgttttgaactatttgtggcctttattaattgagtaaggtatgctgctgtgaacaaaatttggaagatgtttgtttctgtctagttcctctagaatgtggaaactatctgtgagtattcttaacatatggcaatatagttgtttagatcaatgcaatacaaatccattttttttttgcaacaggacacaattggaaaaactggctattttatcaaggctttgactggacaggtatgcttccctttaaggagtcaatcttgacctgcagagccaataaaagccccttggggaagactggcctcataccttgtctacacagtccatgtacagggtttctgacctgtggtcagtaaagaatgtcactttctaacaggtccaggagctcacaggtatttgaggagatgaacccatggctgggctcagctctaagggatcctatttaagattccttgtggaatagagttccatcaaagtcaatccaaaaggcccatgtagagataagcattgttgctgcactttatgcaaatgatcaggccaaatataagactgaagtttattctacaaacaacacagtcctataaccatttgtgaagtgagaactggagagaaaaagattacgctccaaagcttaccaacatttgtcattaaatcctagtcttacagccgggcatggtggcgggcgcctgtagtcccaggtactcaggaagctgaggcaggagaatagcgtgaacccaggaggcagagcttgcagtgagacaagatcgcgccactgcactccagcctgggtgacagagtgagaccctgtctcaaaaaaaaaaaaaaaaaaaaaaaaaaaaaaaaaaaaaaaaaaacaagaaatgatcttgtatggtaaatacttgtctcaaagagaatgcttggttgtttaaaacatggatgttaaggacaagtcactagcttcaagcatgttgtagatggatcatggaagtaatgaaaggattaaaaggatgataaatacttgtccttaaatgaagagttggttgtttaaaaagaagggtctttaggacaagtcagaaagtttaagcatgtcttagatggtctgtggaagtcatgaggggattaataattgcaggaaagatttagccaaagttaacactgaagttactgtagccacccaaattcaatgccacttattctaaaaaagaacgttacttttatattaatgtttcagcagcatctggtggaaggaaaccagtatcacaacccattggaatgactgacagcaatcaaactccaaatggtgctgcagatcaagccacacatggacacatctttcttccaaggacccttagatcaacccaggaggagtcctagctgctgttacccacatgatggcccctttcagcaggaagtagccagaaagagtcatcatccaatttccccaacagcaattagggttaacactccagagcggggagtgatacaggaggtaagaagaaatcactaaggcagatagagcagacagtatgacactgatcaaccagaaaacctatttgcataataagatcagggtgagacaaccaggcttccctgcatgctatgtgaatgtcatacctgactgaaccattctgtgagccctatgtaaatcagacaccaccttctccagcctgcctataaaacctgctgtggttggccacctccccctttttggatgtctctctcttgcaaggagctgctctcctctctcttttattaaactttccgctccttaacccactcagacatgttcatatcctgaattctttctcagtgagagacaacaaaccccagggtatataacccaaacaatgtagccatttcactatgaggttgagcatcttctcatgagtttctctgttgtttctcgtcttctgtgaatagccagtttatttggccatttttgaattgggttgtttgactttacttttgtcaacctgtcatttcactaatgatttttccaaagtaccagttgtctagaccagtgttcctcaatctcagcactactgacatttggggccaaataattccttgttgtgaggcatctgtcctcacaagcatgcttagaagtatccctggcccctactcagttgtgacaaccaaacatgttccggagattgccatatgtcccctcaggggatggtggaaaatcaccattggtctagactctgctgttggtggctttttcttatttgaatttttgttcacttttaaatgtcagcattctcttttcctgtctaccttctagatttcctagcttgcttaggaatgtttttctctcttcaagactatacaaatattattctaaatgttctaacatttttatgttttttaatgtttgcatttctagaatatctagaattcacctttttgtatgatgagataggaaaagtctagctttattttattccagttattgagcaaatcagtcttttcccactgaattgaaatgtccacatttgcacagatgaaaactcctttctgaaagcatgtgtaagcttctgcctgctgggccccccacaggaaaccgagaagccttgatctttgttgctggtgccctggctcttacaggagattaaggtaggggaaacatacactttttgtttgtttctctttatcaattttggcccagagatctttgagaaagtattaaatatatcttccgctccccaacccaagtctggctattgtgactgttgtattattccagaaagggaacagggaggaagaaagaatcagagacatgtggttaaagtcatcttctttctggaatctcttcgtctggcttgttttttgttgttttgttttttagtgaaaagagggtgactttcttcatctgagaacattttataaatttctttcaaagttctaatacccttctacctacctaccattgataccttctataagaaaggtcaactatacacatagtaggccctcaaatacttactgaatgaatgaagtaagattaacttaatgtgattcaggtgttctggtttaagcctctctgatgtgaagaaactgcctgtaaaatgcagatactgctggtggcagtaataagttcacttgttgcatggaaagtatttctaccaacaagttgtcatccttaggtcatgctaggcccaggtaattagggaaatctctaatattgccttttggcctacctggtctggggatcagggctggggaccctgagtagagagcacttgggttaattagaaggacactatagcaacagcaatgtgactgtccttttggaagcagcaaggcatctattaagctttgccagtcctgattgatgcatacattcactaaaccacttctctccctgaccctgctggaaaccatggtactgcttaactatttgggtacgggggggagaggcaatcttattttcacatgaggagaaatgatttagtcttgcagtttcatagctggaagggactgtagtctccacgggccctcctctaacttagggggtagcaggttccattcctaaaaagaagggaggaatggacttgggaacaactgaaggtcgtcgatttgagagatctgtgtctttggagcagtctggtatcttgtattccactgtgactttttggttttgtttttaggctgtaatgatgagcaatcatggaaccataggaaacttcttcctggctggccaaaatctatcatggttgccagtgagcaggccttgcatccactttggaaggtatgtgtaagcttgtctgttactttgatttagacgtctaatccccaaaataatgtgaagttgctaaatcaagaatgttatttaattagtagtttccttaactttcaagtagtttacctaaatgtgtgcattcaactccagtttagttcagtaattatataataggtgcccagtgtggacaaggctgtgttgtaggttccacaacatagataggaaatagccctgtcttctgtaagcacacaacccagaatgagaattagacacatatttaactaattacagtaattacatcgctggacaatatgtctaataggaggtgcgtgggccagggatgggtgaaaaggaaccaagggcttgctgggtggagggagtacgtattgcaagataggcaggatcttactgaagtggggttatttgagcaggatgtggagatgaaatcagtgtttgccaggtagattaagtgagagggcattcagggcagagagaacagcatatgccaaagaacggaggtgtggaacagcatgaggcaggctgagagggctagaaacattttttgttgtgtgtttaacttattgattatgcaaagttattctgtccaagaatgactcaaaaaccccatggcagtggaggcagctgcccgcactgtatctatgatgtgggtggtggtgggggtgccctagggaggaggaggatgtgaggacccatgccaagtttgagccaggactgctttataacttactatgtaaaaatatgtatgcatttcccacataggagtgtaaggaatatttagagaattgtgtgagaaccaggcctttgttgaataatttattgaatgtcctcagtttctcacattggggtaacacttgatagagagaagtcttgcctcaggaggagaaaagtaccttattccaaggcaagaaataagtgcaatcattaactctgctgaatcaaacaacctaaaagaaatagccttgccttggttatcttggagactgggggaaatcttttttcctggtgttaactctctgaatgatgttttggttttcttcctttgtaacctcaacttagagagattgacacggcaaaaagatgtttgtaatgggcctcctaccttcatttcttttttggcagaggagtctagcgatgcatttctattcctaggctgtgaggctccccagtcttttgtctgagccactctttggccttaaagttgtattttctgtatccagaaaagaggaaatctgctacctgtgtgaccttgtataactgcgacagctgtaaggattttcagaagtcctgaacatgctttaacctcccaatgtttatatacattatgatttattaatttctgtactatgactttttttcattattacattaattgctttacgaacaaaacatattatggtgttattaaaggaaattaaaaccaaagaataattttactactctttctgcacttgtatatttcttcaatcagcacacatctgatgagtgtcaatagctctggtcagggaccccagcgaccagcacactgcttatttttgcattcaattctgagcccccatcttgcctggcttagctgtgatgtctgaaaccctcagactccaccctccctacatggtcacctggctcccaggccatcgccctctccttcccctgcttcaccagcccctgctcaactccctgccttgttctttcccatctccccagcttcttcatactggaggtccccagggctttgaccctgacctctcttctccaattgcactcctcacttggcaatctcatcccacctcctagctttaaatgctaattggagggtaacaacccccaaatttacatccataggccagatctctccttgaactccagacttatgttgtctggctgcttgtttgacacctgccctggaaaggcctctcagggctctccccctgaacatgctacaaagggaactctgggttttcctctgtaaatcctcttctcccgtagtctccccatctcattcacagcagcctcctcctgcttgctcaggttggcaaactttgcatcagcgtaggctcttctttttctctcatacccaacatgcaatccatcagaaaatcctgtgctcgatctagaagatacttggaacctgaccaattctcaccaactctacccccagggccatgctgccgtcatctctcatctcagttaaaacagcctctttgggttccctgctcccaccctagcttctctgcatgaagactccacaaagcagctaaaggagcctattctaactcaaggcacacaatggcactttccagctcagagccctccagcgcctctccatcaccaagagtgaaagcccagttgcttacaatggcctacatcaggctgcaggggatctgcacctccttccctctcaggccttgcctcttaggatgcctgtccccagctctagtcagcatccttcaatgtttctgccatgcttccacttcagggcctgtgcctggatgctctctctggatatccccacgggtccctcccctcacctcttctggtctcccttggctctctcctatgcagtcagccccggccgccctgttactcagggttcctggccacttccccacctttctttgctatatagtgcttattgctgtctgttatgctataaaatcatcctctaatttattgtgttgtttctcttctttccaaaagcatgttggcctcatgagggcagggatgggatttttgtctatttcactcactaatgtgtccttaacacctacaatgggccaggggcagtggctcacgcctgtaatcccagcactttggaaggccgaggcaggtggatcaccggaggtcgggagtttgagacgagcctgatcaacatggagaaaccccgtctctactaaaaatacaaaattagctgggcgtggtggtgcatgcctgtaatcccagctactcaggaggctgaggcaggagaatcacttgaacccaggaggcggaggttgcagtgagccgagatcgcaccattgcactccagcctgtgcaacaagagcaaaactccatctcaaaaagaaacaaaaaacaaaaaacacctacaacggtacctcacctatagttggcaatggaccctaatgcatatgaaattaataatgactttttttttaagatggagtcttgctgtgtcacacaggctggagtgcaatggtgcaatcacagctcactataacccccatctcccgggattacacgtgccctctaccatgcccagctaatttttgtatttttagtagagatggggttttaccatgttggccaggctggtctcaaactcctgacctcaaatgatccactcgcctcagcctcccaaagtactgggattacaggcatgagccaccgcacccaaccatgaatgactttttactctaccttttcatttaataatgtaataagaatatatttctaagtctatataaacacagatagagatactttatatgcagttgcgtggtactatatcatatagatatttcattatttattcactgcattactgggcaatttagactataaataagttttcactattctgatacagtcaacattaacagtaaaaataaccattactcaagcacttatgtgcctcttctagatttttttgctttatatttgtcactgctaagatgtttaggaagtagattggtggcggtggtggctttggcagctcaggaccgagtgcaagtaacatagaatcagcatgactcttcagaggctcttcaggttctcctctgtcattctgtcagcagtctcagtccatttgtggaggaacatcagtgttacagcagtggcatttaataaggaacttgatcctatacagaaactcttgtggacaagattagagaatacaaatcgaagtgacagacatctggaggacctgttgatactggtccagagtatcagcaagagcttgagagggagctttttaagttcaagcaaatgtttggtaaaacagacatgaatacatttcccaacttcaaatttgaagatcccaaatctgaagtcatcgaaaaaccccaggtctgaagaaataaagtgaaattaatctggtaatttatcatgggtcaattgtacaactagttagaagtttcagaataaacatacatttcataacggtcaaaaaaaaaaagatgtttaaagcatgtatgttcccaactgtcttattagtacattttaccttttatatttattttgaaaaactgttttctttaatgcttttgggtttttttttttccaagatctctctgctgcccaggctagcatgcagtggcacaaccatggctcaccacagccttgacaactgcttcaattgatcctcccacctcagcctcccaagtagctgagactacaggtgcatgccaccatgctcagctaatttttgtatttttttgaagagacagggtctcactatgttgccctggccggtcacaaacttctgggctcaagcaacccacacacctcagcctcccaaactgccaggactataggcgtgagccaccacaccttgcctgctttgattgtgaatgctactttatttcatattagtatcatcgatgctgttttatttttgttttcatttacctaaaagactttgttgttttcagcctctcttgataatttgggtttaaatgtgtctcatgtcagcagcataatagtgaggttttggtttctattgcagtggttacctccactccattcaaaagttattattggtttaggaggtattttattcattgtaaatgcttctaggagtttttattttgaaagtaacaggtgttgattagttaaaaaaaaaaaaaaaagttacagcccaagcatagaatttgaaatttcctccctactccatctctataaccaataattccagcccccagaaatattgttatatccactggtagaattactcccaggcaaatataaacatacgtgcacaagtgcaatagacatagataaaattttaatgagattatatttattgtttaccttatttttatgacttaataaagctaccctattatttttgtatgctatgttatatttcatcatattcatgtacaacagtattctaaccagtctcttaatcctagatgtctgttagattgttaaatttttaaattacagtatttcaaacaaattacactcctacaaatatttctgcattagggaattgcaagtagaagtttagtatccattctccaaagtgcttgagaccagaagtgcttcacattttagattttctcagattttgggatatttgtattataatactagttgtgatataggacaggcaagccccaaacaggggcctggcccatgaaggctcttggctttgcccaggaaagaatccaagggcaagccagaggtagaagaaaacagttttattgaagaggcagtgttacagctccatactgctcttgcaaagcagggataccccataggcagagaggagcagttgagggcagttttgcagtcacatttatacccacttttaataacatgcagattaaaggacagtttatgtagaaagttctagggaagggttagtaactcttgggttttcaggtcattgccatagaaaggggcggtaactccccggtgttgccatggcggtggtaaattgacatggcacactggtgggtgtgtctgattggaaagctgcttccaccctggccctgttttagctagtcctcaatctggtccagtgtctgagcccagcctctggagtccagtcccacctcctacctcagttgagcatcccaaattaaaaaacccaaaatccaaaaacgttctaatgagtatttcctcatgttagtgctcaaaaagtttcagattttggagcatttcagatttcagattttcagatataggacgcccaacctgtatatcagtggagcacgtgaagagcagcagcagcaggacagttattctactcttttcacttccttccttgttgcctggcttctaattcatcatcagagattatatggaagaaacattaatgggaattctgcccagggaataattccttttgagaaaatgtgaaattcagtgagaatgtgcatttgtgagcattaattcttggagttagactaaaagttctgatatgtagtcctcttttgattttcagataggtatatctcttttggccttcaatattggcagtagccatattatggacctggctgggatagacgcatcttcaggaattgctattggggctggtaagtggaatgtaagtaatattatttgcagcaacaaacctccatctttatcattatccaaataaaactatataaacataaaaatttgctttcaactttgagtaaatataaaagaattcttgtgaagtcatagaggaaagaagccaagtctttgacttgtcaaagggattctgctgattttcattctacttagtaaattaatggagagagaatgtttacattccaaggaaataggaatgcagtgaagaaagaactgttagtagataggttaagaaaagatcatatttagccgggcatggtggcgcctgcctgtaatcccagctacttgggaggctgaggaaggagaatcgcttgaacccgggaggcagaggttgcagtgagccgagaatgcaccactgcactccagcctgggcaacaagagcgaaactctgtaagaagagaaagagaaagagaaggagaaagagaggagaaggagaaggaggagaaagagaaaaaaggagaaggagagagagagaaagagaaacaaagaaagaaagaaagagagggagagagggagagagggagagagggagagagggagagagggagagagggagagagggagagagggagagagggagagagggagaggggaaggaaggaaggaaccatattaacattaaacacatatgcagatatatatgtatatgtgtgtatatgtgtgtgtgtgtgtatacagagacacacacacacacatatatatacacatatatatctgtatgtatatattctgccctttgcagtacatactgagaatgggctcagccaatgtccttgagatattcaactaggaactacaaatcttctgattaatctcccaggagtaccaggttttaaccttataaatatttgattatttatttaatttgtggcatatcttcataaaaaaggatgagttcatgtcctttgcagggacatggatgaagctggaaaccatcattctgagcaaactatcataaggacagaaaaacaccgcatgttctcactcataggtgggaactgaagaatgagaacacttggacacaggttggggaacatcacacaccggggcctgtcatggggtgggaggctgggggatggatagcattaggagaaatgcctaatgtaaatgatgagttaataggtgcagcaaaccaacacggcacatgtatacatacgtaacaaacctgcacgttgtgcacatgtaccctcgaacttaaaatgtaatttaaaaaaaattgtggcatatctttgttataggaaatagaatttattctcctaaattataaatgattttataattctttggtaattaacctatctctgtataaaccatttgacattttagaaataaatcagaaagctccatcctttctgagtctcaccttttttctcagactataaaaaaataaagaatacttctgcagtcaaaacctagtaagaagccctggccttcaccgccatttacccgtcagaattttctggggtttgtttgtttgttttggtacctggtagtcatcttagtaagattgtgttatactttccatagtttccatacacattgtttcaacataatcaacagaccaaatgcagagaagctggtggaagcccaaggctgtggaggctgctggaagacagcctcccaagctttagagatgcaggcctgaccagaagcaggtgcaaattttccttcttgattatgaggtggggaaatcaagtccaaacattattcctatgtaatcccttttgtaagtcaaatttgttttctccatgagccacttggttttaagtttcccaagtcatttagtggtcttgctgcagtcgttgagatctacctgtggccccttcctggaattgggcagtgttttgaaccccatctgcctcttctagaaaggttcccacccaattcagcagtcccagtgaggtccaagaatgccatcgtcattctttcctaacttgtatgctgtggatcaggcacagagacagtactggttcctgctttagaagctgagcttggccaggtttggtgggagccacagaaaaccattcggttcattcaaaatggtttcacaagccatctttacatctttggagttatctacacattttaccatatctcatcccaaatcctcagttcctggtgagggggtgacaagatgtaagaatgtacctccctcaatacagagcaacagggccattttctctcataaccagaccagtctgctctgatggcaccagaatgacaaatgtggctcagttctgagggcctgggtggcaggctctgaaggtgggtggaacagctgcaggatgccgctccttccaagaaagcctgtgggctgaagatctgctaaaagtctacatgtgggcagcaaggaagaacagccccaagcctggggccaggtaaaaccccacatcaagcctctaaattggatttcctgggtcacgtcctcatgtgactaggaagcaaccttagacttggacgccacactccaacgttgggaggggcaccttgctggctataaatctccaggtgacaaactccagcacagggagtcagatcacctacatggtaggcctggagcttgaagaggtgtctctgcgaagagcactctgggcacttcgagatcttcccacagctagaagctaagctaggagtgaggattcccaggagaaggtaagaaggaagttaatagatggagggcacaagacctcattgggtacatcaggaaataaccacttaagcacaagtgttctgatgagtccaaaggtactctggttcctcttgacccagtgggaggcaagctttacagagaaaatctctgaactccaggggctggaggaacctggggcttcggtgatcatcacagggttctgtgagaaccagctgcctggtctctcagaattttcaagtatcttctttcttcacatatttaactcatcttattccttctttgtaaagaaaatcagagccaaacttatttaatttcaatggtatggaatgttagtatagtttatttccctcttccctgaatggttatttttctttctttttttaaactatcttttaaatttaattataaaccacctttattcccatctgacaaataaattaaaaataaatgccttgaaaatcagctcaaataaccatcccgaattaagaatgtatccttttacaagtaaagatcatgttcctgcaaattaagtttctgtgctggaaaatgtatccaagcacctttattggtaaggtccccagtaatgacacattcattaggcagaagacaaataggaaataagcttccttttcaagcttggcctagatgagatcctgatttaattgctctttttcttcttggtttcaggctgtacttctgctctatggcattggttggatatttgtttctgtttataataaggctcaggtaagtggccattatcactctattatttacaatatgtttccttataaatataatgtgtgtactaaaaacatcctagaggagaagttaaactttctcagtcttttgatccttgtgctgacttccccaaatcctgagatggctgaaataccatcagtctgtttggggcaaacagacacctgtaactctccactatttaactctggaccttattcaagagtttacctcttaaagattttatagtaaaccttttaaagctctatgaaaaaataagacctaaataaatgaagagaaaagctatgttaatgaatgaagactcaatatcccaaaactcttggttattcccaaattgatctatattgaatgtaattccaaatttatccaaacagtcttttgaggaatttgacaggctgattctaaaatatatgcagaagagtaaaagtaaaagaatagcaaagatactcttatcaaataaaaagacttgccctactaaatattaagacttactataaagttgtaataattatactgtgtgattttgacacagggataaacactgataattggaagaggggaaaagcccagaaacaccacatatatggacacttgactgatgacattgatgcactgcaggtaactgaagaaaggagggccaactgactatcatatggataaaaaaaattagattcctactgtatacaaaaatacttttagattgatttaaaacctgaacataaaaggcaaacatttttaacttttataagtatagagtatctttatgtcctcgagatagagaaggatttaaaataagacataaaaatctcaaacccctggctgacaactaagcacatatgcatgcatgagaccccagggataccagttagaaaaaagcagaaactagaatgagatctattctggaaagacataactgcacctggtaagatttgtgagttaatcgtgctttcaactgagtacattcttcaactcacacaatgtaggcagtagaaatcggaagttttactggtttcaggggtcaaaggacaaaactaaggactagtaaagcaactggaaatgtatgtgggagctccaaaaacaaaggaaccaaagagagagtgagcccccaaatcggagtataaattttgttcagatttttggctgactgccaaattacacaggtacaggggaaacctccagaaagccagactgaattagcagcagctggaagctgattaagaaaaaaaaaaaaaaacaagcaaaaacatcagctgctgcacattacagagtgggtatgggggatggcataaaacattttgcagttttgagtccagtaaagttaactgcctactaaaacaagaaacagcaagccccagaaaaacaaaacagactgctacattgtattacatatgatagccagttttctgccaagaagtactagacatacaaagaaatggggaaataaatgtaacccacactccaggagagaaaagtcaataaacagaaactgactctaggctcagatgttaatttaatgaacaaagacttcaaaactgctattataaatatgtcccaaaagtaaaggaaaatgtgatattaatgaatgaacaaataggtcctgttaacagataacttaaaactatagacaagaaccaaatggaaaatttagagttgaaaagctagtaactaaaatggaaaatttacagaatttcaacagcagatttaaggtgacagaagagaaaactagtgaatttaaatatcataagaattacccaagaacaaggaaaaaatcaaagaaaaagaagcaaagcctcagagatatgcgatagaatatcaagcagtccaacatacatgtcattggagtcacagaaaaagaatagaaggataagaaaaaatttttttgagaaaatgactgaaaacttaccaagtgtggcagaatatgttactttacagatctgagaagcttacaaaacaccaagtagaataaacacaaagaaaaccacacctaggtacatcatagtgaagctgctgaaagcaaaaaaaaaaaaaaaaaaagttttgaaagcagtaagagaaaaataatgtacatacaagggaataatgacacacttaatcgttgacacctcatcagaaactggaggtcaaaaaacattagaatgacatatgcaaatgcaaaaggaaagaaaacactgtaaatcaataattctacattcagtaaaaatgttttttaaaatcaaggcgattgaataagtaatggttttttagataggcacaaaccatagaaaaagaaattgatattttggacttcatcaaaacttaaacttttactacgtgatattattaagaaaataaaaagtcacctggggcctgccaccactaccaccagtgcctgcacactccactccactgtgggacctgagaactaaggaccaacttgcccagggctcccctgccaccatcatcaccaccaacacagactgcacaggggcccaagtgccagtccatcactgccaccacccaggtgagccatcaggaagcctgtcacttaggagcctgaggacaagcatcctcattttcagcaaagcctcaccacagtcttcaaaaacaacataagccacttgagggacttgaagacaccactaatgttgcttatagctgaataaatcataaggagtttacactatggcacccacccaaaaccaaagccaaaggatcctacccaaccaacactatagatacaggtataagaaaagtctttccctatgaaagctacttcacaaaactggaagaagcaaccattgcaccagatgcacacatttcaacataggacccaagaaacaaaaaaccaaggaatcatgacacctccaaaggaacacagtaactcttcggtaacataccccaagaaaaagaaatctatgaagtgcctgaaaatggattcaagctaatgttcttaaggaaactgagtgagatataagagaacacaagcaatatgaagaaatcaggaaaacaatttataatctgaatgataaattcaataaacagatagatatttttaaaagaactaagcagaaattctgaaactgaagaattcaatgaatgaaataaaaaatataactgagacctttaacaataaactagaccaagcagaagaatttctaaacttgaggagaagtcatttgaaataacccaaagaaaaaagatttataaaagcctacatgacacatggaacaccattaagtgaaagaatactcaaattttgggagttccagaaagagaagaagtgggaaagtcatagaaaacctatttaataaaataatgcctgaaaacttcctaagttttagaagagatataaacagccagatagagacagctcaaaaaattcccaaatagattcaactcagaaaggtactctccaaggtacattataatcaaactgtcaaaagtcaaagacaaagagaattctaaaaacaacaaaagtgtcaagtcacatataagggactactcatcagactaaaagcagatttctcagaagaaatcttccaggccaggaaagaatggaatgatatattcaaactgtggaaaggaacaaaattgctagccaagaatacaacacccagcaaagctatccttcagaaatgaaggagaaataaagtcttccccagacaagcaaaaactaaggaaattcatcaccagtagactagttctacaagaagtaagaagtttctacctctggaagcaaaaggacaatatttaccatcatgaaaacactcaaaactaaaaaactgactcagagcagatagacaaatgagaaaaaggaatcaaattttaccactatataaaaccactagatctcaaagataaacaataagagaggaagaaagaaacaaaggatatacaaaacaatcagaaattaattaataaaatgacaggagtaagttctcacctaacagtaataaacttgaatgtaaatagtttaaatacccccattaaaagatatagactggttgaatagctatgctgatgtaagacaaagtagacttcaagtaaaagagcatagatacaaaaaaagtcactatataatgacaaagagattaactcagcaaaaggatataatgattataaatacacatgtacccaatactagtgaacccagatataaaaagcaaatattactagagctgaagaggagagatagagcccatacaataattgctgtggactttcacaccccaattttggtgctggacagatcatctagaaagaaaatcaacagaaaaattgcacttaatctggtctacagaccaaatgggcctcacagacatttacagaaaattttatccaacagctaaagaatatcatttgtctcatcaggacatggaacattctccaggatgtatcatatgttaagccacaaaacaaatctcaccaaggattttaaaattgaaattatattacctatcttctcagaccaaaatggaattaaactagcaatcaataatgagaggaactgtggagactgtacaaatacatgaaaattaaataacatgctccagaacaaccattaggtcacggaagaaattagaagcaaatcaaaaaaattcttgaaacaagtgaaaataaaacacaacataccaaaatctatgagacagagcaaaagcagtgttacaagggaagcttatagcaatctttctgcacctatatcaaaaacatagaaatattttaaataaacaacctaaagatccacctcaaggaactagaaagcaagaccaaaccaaacccagaattagaagaaggaaagaaagaataaagatcacagtagaactaactgaaatcaagacaaaaaaatacaaaagggccaggcacggtggctcctgcctgtaatctcagcactttgggaagccgaggcaggcagatcacttgaggtcaggagttcaagaccagcctgtccaaaatggtgaacgctgtctctactaaaaatataaaaattagctggatgtggtggtgggcacctgtaatcccaactactcaggaggctgaggcaggagaatcacttgaacccagcaggtggagtttgcagtgagaagacattacaccactgcacaccagcctgggcattggagtgagacctagtctcaaaaaaaaaaaaaaaaaagatcaacaaaaggaaaagttggttttctgaaaagacaaaatttacaaaccattagctagactgaaaatacagaagactcaaacagataaaatcagaaacaaaaaggagatattaccattctatggtaattttctgataccacaaaaatacaaagggtctttagaggttattatgaacaactatatgccaacaaattagaaaacctagaggaaatggataaattcctggacacatataacctaccaagattgaaccaggaagaaagaaaacctgaacagagcaacagtgagtaatgagattgcatcagtgcattagtctgttctcacattgctataaaaaactactggagactgggtactttataaagaaatttatttgactcacagtttcaaggatgtacaggaagcatagctggggaggcttcaggaaacttaaaattatggaagaaggcaacgggaagcaggcatgtcttacatggccagagaaggaagagagagtaaaggaggacgtgctacatacttttaaacaaccagatctcacaaaaactcactattacaagaacaacaagaggaagtccacctccatgatccaatcaactcccactggtccctcctccaacattggggattacaattcaacatgacatttgattgaggacacaaagccaaaccatatcattttgccccctcccctcccaaacctcatgtccttctcacattgcaaaatacaatcatgcctttgcaacagtctcccaaagtcttaagtcattccagcattaactcaaaagtccacagtcctaagtctcatctgagacaaggcaattcccttcttcctatgagcttgtaaaatcaaaattagttcgttacttccaagatacaatgagggtacaggcagtggctaaatactcccattccaaaagagagaaattaggcaaaacaaaggctacaagccccatgccagtccaaaacccagcagggcagtcattaaatcctaaagctccaaaataatctcttatgactctaacatacaggccatgctcacacaaggggtgggatcccaaggccttgagcagctccacccctgtgtctctgtggggtacagccccacagctgctttccaggctggcattaagtgcctgtggcttttccaggtgcacagtacaagctgttggtagatctaccattctggggtctgatggactatgacccaattttcacagctccactaggcagtgccccagtggggactctgtgtgggggggtccaaccccagatttcccttcagcgttgtcctaatagagtttctccatgagggttctactcctgcagcagacttctgcctggacatccaggcatttccatacatcctctaagatctaggtggaggctcccaagcctcaactcttgccctctgcacacttacaggtttaacaccatgtggaagccaccaaggatgatggtttgcaccctcaggagtagtgacccaagatgtgtctggtgctcttttagccatggctggagctggagcatctgggatgcagggagcagtgcctcaaggctgcacaaaacaacaggtccctgggcctggcccacaaaaccattcttcccttctaggcctccaggcatgtgatgggacagctgccacaaaggtctctaaaatgccttccaggtattttcccaattatcttggttatcaacatttggttcctctttacatatgcaaatttctgcagccagtttgaattcctcccagaaaatgggtttttcttttctaccacatggccaggatgcaaattttccaaactattacactctgcttcccttttgaatataagttccagtttcagatcatctctttactcacacataacaaaagtggccttggctccatttctcaataagttcctcatctccacctgagacctcctcaacccagactttattatccatatcaccatcagcatttcggtcacaacaatttaacaagtctctaggaagttccaaacttgccctcacctttctgtcttcctttgagccccccacactctgcccattacccaattccaaagtcacttccacattttcaggtatttttataggaatcccccacttctctggtaccagttttctctattagtccatccttgcactgctataaagaaaactacccaataatgggtgatttataaataaaagaggtttacttgactcacagttccacagactgtacaaaaagcatgactgggaaggccactggaaacttaggcagaaggtgaagaggaagcaagtatgtcttacatggccagagaaggaggaagagagactgaagggggaggcactacacacttttaaacaaccagatcttgtgaaaattcactcactatcatgagaacaacaagggggaaatccacccccatgatccaatcacctctcaccaggtccctcctccaacactggggattacaatttgatatgagatttgagcagggacacaaacccaaaccatatcaatcagtaataaaaattctaccatcaaatctgaggactgggtgtctgcactgctgaattctaccaaaattcccaagaaggactaacaccagttctcctcaaactattccaaaacattgaagaggaaggaattcttcccaactcattatgtgaggccagcatactctggccagagtgtcagtactctgtctggtaccaaaaccagacagagacacaatttaaaaaaaaaaaacaaaaacaactgcaggccaatatccctcatgagatacaagaatccacaataaaataatagcaagctgaatccaacaacacatcaaaaaatacaccataatagagcaggatttatctcaggaatgcaagggttgttcaacatgcacaaatcaataaatgtgatacatcccatcaacagaatgaaggacaaaatctatatgatcatctcaatagatgcagaaaaagtatttgataaatttcaacatccctccataataaaaacttacatgacaaacccacaaaaactttatactgtatgaggaaaagctaaaagcctttcctctaagatctggaagaaaaggaagcctactttcactgatcttattcaacatagtactagaagtcctagccagagtaattaggcaagagaaaggaatataggacatccaattcggaaaagaggaaggcaaattgtccctttttgcagacaacatgatcatgttcatatgtatatgtacatatatacacatatatatatacctaaagattccaccaaaaatctcttagggtacaggtagttaggcatgagtgggagaggagagggctctccccccacacccactagaaatgctgggaatgctgggtgatggttcagcaattgtcacattgcttctctaaaaatgataattcagcagcgccagggagaggccatttcctgatgatccacacctgttaatatcaaaatgttaactgaatgcagaccccagggtaagcaactttctgggcatgcatgttaagagtaaaaatggtgaagtatgatcttccaggggcacactacaacagaagagggaagaaagcctcagatgggcatgtgtataaccccctaaacatactgtgcaagctcaatcccaaagggtaaggaaagcactgggtacacagaaagcccactttaagggaagaatcatgggaaagaggtgaacttataaaagtcctaggatcacagttaaacagagcacttgaccttctccctttaacctttaagggccctcttccaagcgcactttcctttatttcctgttctaaggcctttttgaataaacctccatttacacactggaatttgccttggtctctttttctgctttatgcccctcagtggaattctttcttctgaggtggcaagaattgaagttgctatggacccttatggataggctgctggtaactcagggtaactcggacctctgccactggtaacattggaactgataaattcagtgatgttcaggatataaaattaacatacaaaaatcagtagcatttctatacaccaacaatgaactagctgaaaaagaaatcaagaaattaattccacatagaatagctaccaaaaacataaaataccaaagatgacatttaatcaaggagataaactatatctacaatgaaaactacaaaatgctaatgaaagaaattgaagaggacaccaaaaaatgtaaagatatcccatgatcatggattttaatgaatattgttaaaataaccatactactcaaagcaatctacagattaaaagtaagtcctatcagaataccaacattctttacagaaatagaaaaaaaatgataaaatttgcatcgaaccaaagactttgtgtaactaaagaaatactgagaacaaaggacaaaattggaggcatcactctacctgactttaaaatatactaaaaagctatagtaacccaaacagcatcatattagtataaaaatagacacacacaccaatggaacagaatagagaacccagaaatacattcacatatttacagcctactgatctttaacaaaggcatcaacaacatacattagagagacaacaccctcttcaattagtggtgctggaaaaactggatatccatatgcagaagaataaaactagatccttatctctcaccatatatgaaaagcaactcaaaatgtattaaagatttaaatgtaagacctgaaactataaaactagaagaaaatataggagaactgcttcaggacattggtctagaccaagattttatgagtaacttcaccactatgcaatctatacatgtaacaaagttacacttgtacctcataaatttatacaaataaacaattttataggtaagatttaataggtaaaactttattttatgggtaaagcacaggcaacaaaaacaaaaatggacaaatgggactatgtcaaacctaaaagcttctgcacagaaaaggaaacaatcagcagagtaaagagacagccagttaaatgggtgaaaatatttgcaaactattcatccaacaaaggactaatatccagaatacacaaggaactcaaacaactcaacagcaaaaaccccaaataatccaattttaagattagcaaagtatctgagtacacatttctcaaaagaggccatttaaatggtcaaaagtatactaaaaatcttcaacatcactaacactcagggaaatgcaaatcgaaaccacatctcaccccagttagaatggcaattatcaaaaagacactagcaaatgctagtgaagaaatggagaaaatggaactcttatacactattggtaggaatgtaaatcagtacagccatcacagaaaacagtatggaagtttctcaaaaaactaaaaatagaaatatcacataatccagcagttttgctactgggtatttatccaaacagaaggaaagcagtatgttgaagacatacgtacatctgcacacccattttactgcagtgctgttcacaatagccaagataatgaatcagcctaaatgtctatcaaaaaatgaatggattttttaaatgtggtatatttacacactggaatactatccagccaaaaaaaaaaaagaataaagtcttgtcattcccagcaacatggatgatcctggaggaaattatactaagagaaataagtcagaaacagaaaaatacatatcacatgttctcatttctatacgggaatttaaaaaattgagctgatataaatgggaagagtgggcggtctggagaagatagaggttggttaacaatctgaagttacacagctgatgggaggaataagttctagtgttctgtagcactataaggtaaagatagttaaaaacaattagtgtatatgtttgagaagctagagaagagaattttgaatgtccacaacacaaagaagtattacatgttcaaggtgatcattatgctaattgcctttattttatcattccatattgtatacatgtattaaaatattattctgtatcccataaacatatacaattattacgtgtcaattaaaaataaaagaaaaaagtaaaactagtctagctagagactgggagaaaatatttgtaaaacaaaaattaattcaagatggattaaagacttaaatgtcagccctaaaaccataaaaaccctagaagaaaacctaggcaataccattcaggacataggcatgggcaaagacttcatgtttaaaacaccaaaagcaatggcaacaaaagccaaaattgacaaatgggatctaattaaactaaagagcttctgcacagcaaaagaaactatcctcagagtgaatagacaacctacagaatgggagaagatttttgcaatctacccatctgacaaagggctaatgtccagaatctacaaagaacttaagcaaatttacaagaaaaaatcaaacaaccccatcaaaaagtgggcgaaggatatgaacagacacttctcaaaagaagacatttatgcagccaaaagacacatgaaaaaatgctcatcatcactggccatcggagaaatgaaaatcaaaaccacgatgagataccatctcacaccagttagaatggcaatcattaaacctctggggactgttgtggggtggggggagaggggagagatagcattgggagatatacctaatgctagatgacgagttagtgggtacagcgcacgagcatgtcacatgtatatatatgtaactaacctgcacattgtgcacatgtaccctaaaacttaaagtataaaaaaaaaaagtcaggaaacaacaggtgctggagaggatgtggagaaataggaacacttttacactgttggtgggactgtaaactagttcaaccattgtggaagacagtgtggctatccctcaaggatctagaactagaaataccatttgactcagccatcccattactgggtatatacccaaaggattataaatcatgctgctatgaagacacatgcacatgtatgtttattgtggcagtattcacaatagcaaagacttggaacgaacccaaatgcccatcaagggtagactggattaagaaaatgtggcacatatacaccatggaatactatgcagtcataaaaaagatgagttcatgtcctttgcagggacatggatgaagctggaaaccatcattctgagcaaactatctcaaggacagaaaaccaaacactgcatgttctcactcataggtgggaattgaacgatgagaacacttggacacagaaaggggatcatcacacaccgcagcctgtcatggggtggggggaggggggagggatagcattaggagatatacctaatataaatgatgaattaatgggtgcagcacaccaacatggcacatgtatacatatgtaacaaacctgcacgttgtgcacatgcaccctagaacttaaagtataataaaaaaaataaaaaataaaatatttgtaaaacatatttacaataaaacacttatatccagaatctgtacatatttaaaacttgtaactcagttaagaagaaggtttgaacagatgtttaaccaaaagatatatacaaatggcaaataattaaaaggttattaatcattagggaaatgctaattcaaataagataccaagctgggcatggtgtcacacgcctatagtcccagctacttgggaggccaaggtgggaggactgattgagcccaagagctcaaggccagttggagcaacagaacaagacaccatttctaaactaagtaaataaataagataccactacacactctattttgtattctttatgagccagtcagatgggttgggtgcagccacaggaggagacatagaagctcagaaaaaaaaagtttattatactcacaggtcctagagacaggaggcatggcatgccatgcaggaccacatgggaaagacatcaggtggtcaggaggaaaaagacaaagggaagggttgggatactgcctttattgaggcttctgcagaaaaggcaaggcagtgcagaatgaacagtttactttgttatggcagccctagcaaagatataagtagtaagtgtgaaacagcttgggaagcttgggaccttgctaaaaaagtaagccatctacgatttagagccaaatcaaaggtgaaaataataaaagctacaggtatttagaagaagagggcatatggttcttgtgaagtccccaggtaagtcttgataaagcaggtagaatttgagatagaacttaaaatagacatgtttgaggtcagtggacaagaacatatgagaatagtcaggatagaaagtggaacaatattcattagtatctattcacctaccatgagccaggcactgagctatggtccaggaatatagtgaacaaaaagggcatggttcttgtcgtcttggtgtgcacagcctgagatacagcaggattgtatgggacaccagcatgcacaccggcagtgttggcacaggacaagtcacagagctgtgtagtcaggacctgtctctcttgaacactggctatctttgtactatgtgattaagcacttgattttgctctatgattattccataaaagggatttgtcatcattaccattctcagctggattttcttctgcatcaaatattgcacaagaagctggattccaaactcctgggagacagtggtgtttattctcctttcttatttctcccatcttaacagatgccaggggcagtgactccccatcttgaattcttgggctactcccagaatcagccatgtctctaacaaccagaacttgtgagcaagactcatccccctgggtctgcctcttcagcactcactgttgatggtgacttgtctcattgcttgtacaggtggtgacagtgccagaatatttcaagaataggtttggtagctatcagagtgagatccttctctccattctgtatttattcctctgtatcttcaataagataccagtgagttgtgtaaaatccagcccaagaaacagaaccaagaaaaaaaagcaagaggcaggactcaagattatgctggatttgtcccagcgatttactctgggtcctctaaattacttgttggcctttgttgtgaagccagagtagaaaaaaatgacttcacattcacaaaaaataaaagaagcatcttctttacctcccaagcctaggttacaggtccctcctctgtattcccaggaaccttgggcttacccatctcatatcagtaggtcatgtgcttaaaagaatccaggaattttcaccacctgtacaaaacttaaacttgttctggcttttaaaggctgtcctgcggaagccccagtctacctttctaaatggatctccttatttcctaatggttacacactgtgctctagtcacactgcttgcctcattgattctcaagtccagcaagcttattccaaatcaaaaccctctagacttgctctgtactgtgtctggaatgttcttccctcagatcttgcatggctaactccttgtattattccttgaaagaaaaatagcacttccttgaaggggccttccaaggatgcacccaattcatctctactccattactcaggtcttggtttttgtctttaattagagacagggtcttgctatgttgcccaggctggagtgcagtggctattcataaatgtgatcatcattcactgctgcggcaggccaggtctcactaacgcaggcctctgtaacaactgtttcagcactgactgagtggttaagttaaatattaaaagctgatagagccagtgctctaatacaaatgctggaatgtaacaaaggctcaccaagagttttgtccaggcctttcctgggccttgaagcatgatgagataaaaaaggaattcttaaaaggacccatttagaattaagcaagtttcattgggggtctgaagaaaccccccaggtctccacaaacaagtttattggaggtctgcaagaactcatcaaacctccatgatttagcaggagacaagataagggtaattgccccagcacctgggcccatttagattaagaaaatttactaaggctccagaggaaggtcttcaggactcagatctcagttacagaataaaagttagcacttatgtctttagataaatgcacacttacacgtagacatatagcttagaaggcacataagttctagaaaactgtaattttgagttagtccaaattttgataatttccaggccttctccctgtaaccagttacataaataaaaaactcttctttcccagttcatctgcatctcattattgggccacgagagtaagcagcctgatcctcgttttggtctaggaacacttgaacttgaactcctgggctcaagcaatccccctcctgagcctcccaagaagctgtgattataggtgtgcaccactgcacccagcttcactgctgtttttattttctgtgaaatgcctgccaccatgtgaaagcaatttatctgcttgcttatctggcttctccacttcagtgcaagcttcctgagaccaagggcctcctgccttgttcactgcgttaccttccccctgtactgagaacatgtttagcacataaggtacttcataaatgttttctgaataactggaatagtggcacttatcacactgcatagaaaatgcctattttgtggtttgtctccattaaacataagctcttgaggatggcaactgagttttggtaacttgtgtcttctgaacactgctgagtgtctatgacatggttggcactcagtaagtagttagtgaataaatggatagatgaatctgtccattttatccctggctttggagatcagaataacaaagcaaggggttatccagttaaatgatgtgcagatgtttcaaaatcagtgtcaactgagccaggggtcaacaaatctggtcagcaggccaatctggataatgatgggctttgtgcagctctgaagctaagaatgatttttatagttttaaaaggttgtaaaaaaaaaaaaaaaaaaaaaaagagagatggtatgtgaccagcaaacttgcctttacaggaaaagtttgctgatccctgagaagtcattcccgttccctttttccagtggtggaactgtaaaaacaactaactctctgaactaattccctctctgaagctccagagtggaagaggctaagttgtgccactggaagaatggggttaactcaagccctaaaagtactaaccttggctgaactcatggggcacaagcctatgctcaacaaaacggatgaaccttacccagtgtccactggtgatgtagtgctattcagataccacctctggtagatggcttctaaggtcagtgtctttgtggaatcactgtggattcagttggaagtgaaagtgcagcctgctgactccgtattcatttcagttggaggtttgctcttctgccgtgttcatgaagatagtttaggaaatgggtgtttaactgatcacaatctcgctgaaaattgctggcattcataccatctcaggtgaggttactctaaccacacaagtacttacattggcacactctacttagtggatgacagagaagtcattctacctaaagatagagaagtctatctctgtgaatgacagagatgtcattctacctaacatctctgcagtttgtagaaaaactctttatagagtttgtagacattgaagcagcagtctccagcttttgcacttaccctaagtctgtaaatgacattgctaagacctgaggagactgaacaatgaaaagaacagagacggggggcctaagtagtgtcctcccactagaaatcagcttgggctggctgggtccctcccaggggtctgacagggacaacagcgattatgtctgcggtggggagggacactgcaggccaccaggtaaaagactgggagcacagaagacaaatgatggggaggcagcagccatgggccacctggtcaggcctgatcagatggaatcttttgtaggggcagttctgtcctaggcagctactgcctaggttctgagagtggaagctctcaccactccttctttccagcaacagtgcaaatctcagatgctgggtgtttccctggcagttcaccagagaccaaggggaaagaatcaaagtgaggcacagaatgccctcaatcagtggttcacagtgcagaggagtgggaattggatttttcttcccagagggcacttggtaatgtttggaggcattctgggttgtcacagctgggccagggggagctctgctggctgttaactgttgcttccaggtcaggtgcagtggctcatgcctataatcccagcacttcaggaggctgaggcaggaggatcctttgagctcaggagtttgagaccagtgtgggcaccatggcaaactctgtctctacaaacatttttaaaattagccaggtgtgatgacacacacctgtagtcccagctactcaggaggctgtgggaagactgcttgagcctgggagatccaggctgcagtgagctatgatcatgccattgcactccaccctgtcttaaaaaataatgataaaaatttttaagaaagggaattaaagggaaattaggaaattgtgacacagaagggcaagataagaatccaacaagagatcatgaaggacattaaagagagaaaacaggatggactaaaactaagcataagtcactcactgaattaaagagatcaagcgcctgaatgtggagaactgggggtgtggtggggagtatacagagtacttgatgtgggagtaactttcagaagagtgagtcaaatgtggctttctttctctctctttgcctgttcaggtggtttgatagctgtggtttataccagcatcttgaatgctgacattatgctttggggatcagtcatgttaataggctttgggaagtaaaacaagatgactgggtaccatggtggaacctttggctctagagctgcctgggccatcagcatctttgtctcacagatgaggatgatacagaaggactgggctctcggctaaaccccaaccttaaccctggaaccacagctctaagtgaaaacagctgaccctgtttttccacccaaatgttgcctttttggcctgctccacccctatcctgtgcccataaaaaacttcagaggcagagcaacacaaacagctgagtgtcaaggtataagcggctgagtgacagacaagcaactgagcgtcagagactataaaaaaacacagctaatttcagacagtgcagttttggagaagggtctgaccagaaacggttaggctttaggaaaagatcactttcccatcctttttccagccaagtgggaggtgccagccatctggctacatgggacccctaacccgaggcttccctggggactgggaggtgtgcgcagctcattgctgcctcgcttagcccttgaacatggcacacgcatgcagcagacacgcccaggctcctaagcagggaggggagggggtgagcagaggaaccaccacacaccatgcctgcccgtggctgttggggtgagtgtggggatggcacctctaagaaaaaacgggaatcacattgttctgaattc

SEQ ID NO: 22 - DNA, 114801 bp, Homo sapiens
aagcttgtaacagatacaagcctttaaagaatgacatttgcagtcacccagtaggacatatcttgagatgaaatcagagttgtgggctttgcagacaacagcagtcatttctggtggcttccgggagtggagggggactgcagctttggcaatgtaggtgataccaaaaggactatagtaattttttcttagtaattaaaaactaggctgggcgcggtggctcatgcctgtaatcctggcactttgggaggccagggtgggtggatcacctgaagtcaggagtttgagaccagcctgaccgacatggtaaaatcctgtctctactaaaaatacaaaaattagctgggcatattggcgcgtgcctgtaatcccagctactgaggtgggtgaggcaggagaattgcttgaacccgggaggcagaggttgcagtgagccaagatcgtgccactgtactccatcctgggtgacagagcaagactccatctcaaaaaaacaaaacaaaaaccagacataacaaggtcgagctcagtggctcccgcctgtaatctcagtagtttgggaggccgagaagggcagatcacctgaggtcaggagttcaataacaacatggtgaaacccggtctctacaaaaaatataaaaattagccaggcatggtggcacacgcttgtgatcccagaggctcgggaggccaaggcaggagaatcacttaggaggcggagggtgcagtgaactgaggtcttgccactgcactccagcctgggcgacagaatgagactccgtctcaaaaaagaaaaaaaaatccccagccataacaatatacatgtatgttatacaataaccaaaccaatatagaagggtatatagtgaaaggagaagtattgttgtgggtaaaattgtttctatgaataaatggctgatccagtatttttttcctccaaaaaaacaccttttcccctttgatttagtgtataccacacagagtcgcttagccgattcagtgacttttttgatagctggagaatgcttcctaatggttgcaggtgtgtaggggttttcttgacattttcagtaagaaagtgaatgttgtgccataggaaagctttatcacaggtgcacgttggtagccaaccaaataacgtgagtgtcaagtacagtatctagtgagtggagaataactgtaataattacaattacagttgtagttaaagtgaagtttgtatcaaaatttctgtttcaaaggtgaacttttagggggtgtatctgcagtgtttcctcctcagatgtgatttctctgaagcagtggttctctataactgacttgacacacagtgcatctgatatttcgaatgacttaagtgatagtatcaaaattactatcatatacatatttaaatcacatgactaacttgtgtgtggtattatgcaaactgctcagctcagtaagggaacagaaataagaaaaaaaaaggacaatattgggagtcttttatacaattaaatttgttcgattaaaggactatcctttctaaaaaaaaaaaaaaaaagtcctgctttcttggtgttaaaataaagcatcttttatgaaatgatggtgatagtaaatggtgatatacagtaaatgtaaataatagcaaatacaaggttagttatcttattgtgatttgtaaaaataaagagagccgagaatctcgttttgctgctattgtttgggagttcaggaaaaagttcctggggcttttgttgttaagaagattcaaatacaaattatttcttaagagtaaatatgagtttattttgaggtcatttgtcacagtctactgagaaatccactgagaaagcttttaagtttgcctggtattaaagatgttcctattctgatcattgttaaatagatcttttcttattagatataaaatgtcaggagatattttattttgagacagagtttcgctcttgttgcccaggctggagtctaatggcatgatctcggctcaccgcaacctctgcctcccaggttcaagcgattctcctgcctcagcctcccaggtagctggattacaggcatgtgccaccactcctggctaattctgtatttttagtagagacagtgtttctccatgttggtcaggatggtctggaactcccgacctcagatgatccgcccgcctcaacccccaaagtgctgggattacaggcacaaaccccctcactcggccccaggagatttttttgtgttgtgccaacaaaataagcctaggcagggaaattccttctggtggttggaattgttagtactgaatagactagctgcgaggtaaaaacccccatggggttttctgtcagctcagatatcattgtgaccccagtcttttgctgtgaaataacatgaccattaagaaagtagccttaaacaacgtattttgggtatgttgaggaggagggacaattatgatctgttccaaagtgaacataacagatgatccctgtgtctgtgaagcctttaaaatttatagtgctcttcttctgttaatttcaagtaagatttagttattgtgacatactctttaaaaacctgcggtgtatcaaaaggctcatttttaaagcatcttgaaaggaaattaataatgtaatatctacttcagaatagtagtttttacattctgaagagtgactgactgctctcagccacttctgaattctcaattttcaaaggataatttggtaactccataaagaaaatccgtaaataagagagtgaatatcttctttttgtttgtttgtttttgagatggagtctccctctgtcgcccaggctggattccagtggcctgatctcggctcaccgcaagctccgcctaccgggttcacgccattctcctgcctcagcctctggagtagttgggactacaggcgcccgccaccacaccctgctaattttttgtatttttagtagagacggggtttgaccgtgttagccaggatggtctcgatctcctgacctcgtgatcagcccgcctcggcctaccaaagtgccgggatttaaggcgtgagccacagcgcccggccccgagagtgaatatcttttaacagtgtttttcctgatcttttccaacatcttcattgtggttctgtcctttattttttggttaaatccagaggtttacttctgcctgtatctttccaaactattaatctgttcacaatcactctcccatttaaacccttcagcaaccccagtaccttcgtaataaggtctccttagcttggtatccagaacacttcaatactgggctttgacccctgttctccttcccccacctctgtttaggtgcttcactgagctgcaccgaacagctcttggccccttgaaatctctgcagtctccttgtctccctctgctggaatattcttctctcacttcatctgatcattgccttcaaaactcagctcattttcttatttccttgccctttccatgtcccttgttttcctctgattaaattaatgttccaaactcaaaagaaaaacaactcagctcaggcatcacctttcctggaaggcttccctagtcctcctgcctcccgcagacttgtctggcaccctgtgcatttgggatttggcacactatgtctcgtctgcggcctccactggacgatgagaccgtaagtgtgtggcttgacggaaagttgttgactctgctggggtgctggtacagtgctgggcacggcagtgttacagaggaagtgagccacttagtttctgcccttaggagcttttcttctagttgcagttgaccctgccagctgtgagacacctcccagtagtgcgtaccaactttcaaagtctgtttaattgtatcttagtgtctgattccaattttatttcttgaaggaggggagtgtctctaatgtcttattttggcacccagagaccaggtaggcatcatttttgtcccaaattgtggaaggaatgtacatttggcacagattacttcccttttttctcttgtacacctttcaccttttttgtttttgtctttttttttttttttttgagtttgatgtgtttggacagtaagggtttacgagattaagattaaatttcaactttgtctattgtgcatatagcctaaggaaaacaaaaagttaaagaggaaaaatacattgcctctaagaagaagactcattattcaactttttttatttttaattgttttcagagactgggtctcaccctatcacccaggctggagaggtgatcacagctcaccgtagccttgaactcctgggttcaagggttcctcttgccttagtcttctcactagctgagactgcaggcccgcaccagcacacctggctaattttacaaaaattgtttttgagagacgtggtcttgccatcttgcctaggctggtgtggacctcctgggttcaagcaaacctcccaccttggccaccctaagtgttgggattacaggcatgacccattgtgcccagcctaaactttttttttttttttttaatgctgagctgtacacagaagaaagtaaaggtattggtcaatcctaggaaagaagtatgcaaagaaactggtggcaggctggatatgggcatatttcagggctttggaaggtgaagaggagaggattgcttgaggctgagagttcgagaccagcctgggcaacataacgagaccctgtctgtacagataaacattttataattagccaggtgtatgtaccctagaacttaaagtataataaaataaaataaaataaaattcaccaggtgtggtggtgcacaactgtagtctctgctactcgagaggctgaggcagggggatctcctgagtccaggtgtttgaggctgcagtgagccaggatcacaccactgttctccagcctgggctacaaagcgagactctgtctctaaagaaaaacatactggtggcattgtcaagatttgtcaagaaatagccattatgctgggcccagtggtgtgcacctgtagtgccagcttttcaggaggctgaagtgggagaatctcttgagcctaggagtttgagttcagcttgggcagcattgcaagagcccagtctcaaaaatattaggtcaataagatttattttaattaaacaagaaaaagaaatatctgctaaaatttaaagctattctattcttcctctctctcttctagtgttcttggggaagatcccgactaagccattttccagtggcacctcttccaccatgagttcctgaggcagtccgatggggctactttattccagaacaatcacagtgagacctcttctcccgataaatgccccttttctctccttaatatattatcttgcttacaaaacactggtgtctccttatcattgtttggttctatcccactgggaccaagaattcttgcccaggagcaactgaattttcttcttgcttgctttttaaaactttggtggggtagagccaattttaaatcttctgatccattttttcattgtttttctcgcccttctgcattttctgcaaattccgttgaatcattgcagttacttaggtttgcttcgtctcccccattacaaactacttgctggagttttcaaccctagttccctcatttttatgatttatgctcatttctttgtacacatcatcttgctccatctcccaactcatggcctctggccctggattattgttttagtcttttatttttttgtcttcttctacctcaacacttatcttcctctcccagtctcctgtaccctatcaccaaggttgtcattaacctttcatattattcctcattatccatgtattcatttgcaaataagcgtatattaacaaaatcacaggtttatggagatataattcacataccttaaaattcaggcttttaaagtgtacctttcatgtggtttttggtatattcacaaagttatgcattgatcaccaccatctgattccataacatgttcaatacctcagaaagaagtctgtactcattagtagtcatttcacattcaccactccctctggctctgggcagtcactgatctttgtgtctctatggatttgcctagtctaggtatttttatgtaaatggaatcatacaacatgtgaccttttgtttggcttttttcatttagcaaaatgttatcaaggtctatccctgttgtagcatgtattagcacttcatttcttatatgctgaatgatatactttatttgtccatcagttgttcatgctttatttgtccatcagttgatgaacatttgcgtttttgccactttgggctattatgaataatgctactgtgaacaagtgtgtacaagttcctctgcaaatttttgtgtggacatatcctttcagttctctcaggtgtatatctgggagttgaattgctgggtcatgtagtagctatgttaaacattttgagaaactgctataatgttctccagagctgtaccattttaaattctgtgtatgaggattccacgttctccacttcctcaccagtgtatggatttgggggtatactttttaaaaagtgggattaggctgggcacagtggctcacacctgtaatcccaacacttcaggaagctgaggtgggaggatcacttgagcctagtagtttgagaccagcctgggcaacatagggagaccctgtctctacaaaaaataatttaaaataaattagctgggcgttgtggcacacacctgtagtcccagctacatgggaggctgaggcagaaggattccctgagcccagaagtttgaggttgcagtgagccatgatggcagcactatactgtagcctgggtgtcagagcaagactccgtttcagggaagaaaaaaaaagtgggatgatatttttgacacttttcttcttgttttcttaatttcatacttctggaaattccattaaattagctggtaccactctaactcattgtgtttcatggctgcatagtaatattgcataatataaatataccattcattcatcaaagttagcagatattgactgttaggtgccaggcactgctctaagcgttgaagaaaaacacacaaaaactttagcattcttagagtttattttccaatggagggggtggagggaggtaagaatttaggaaataaattaattacatatatagcataaggtttcaccagtgagtgcagcttgaatcgttggcggctttcttagtagtataaatacagtactaaagatgaaattactctaaatggtgttacttaaattactgtaataggtattactattagtcactttgcaggtgaaagtggaaacaccatcgtaaaatgtaaaataggaaacagctggttaatgtggctctggagtttttctaggacataaactgatgagctagaaaagtaaatgtgtcagtccttggtagcaaagtttgtacgtttataaattttatccaaatcctcttaatctagtaattaatagacactcttcacaaaaggatgagggaggtatatgtgtatgtgttgaaaggttccgaaggatgcaaccgagagtactttgggggacgtggcaaaacttccaggcccattcaagagtcttgttttctccctgagcttttatgtatttattatattgccctattaattattgagattgtgccttacagtaaaagctgctttaaattgttgacgctataatttaaaataatctgggtcacctagagtggttaagcctggaagaaaaggatgtccttcctgccagggcagattgtatgtagatatgcaacctggttgcgcctgtgctgacctctactctgttgggcctggaagtatgcagttcaacgtttctcttctgatgtttttttggggggggggttttgtttttttttttgtttgttttttgagacggagtctcactctgtcacccaggctggagtgcagtggcatgatcagggctcactgcaacctccgcccatccaggtttaagcaattgtctgcctcagcctctggagtagctgggattataggcgcatgccaccacatctggctaattttttgtatttttagtagagacggggtttcaccatcttggccaggctggtcttgcactcctgacctcatgatccacccacctcagcctctggagcagctgggattataggcgcatgccaccacgtctggctaattttttgtatttttagtagagacggggtttcatcatcttggccgggctggtcttgcatacctgacctcatgatccacctgcctcagcctcccaaagtgctaggattataggcgtgagccactgtgcccagcttttgttctgatttttttaaaaaatttgactttgtttactttttattttatttttatttagagacagagtctcactattttgcacaggctggtctcgaattcccaggctcaagtgatcctcttccctcggcctcccaaatgctgggattacaggcatgagccactgcacctggccttaactttgaaatgaagttagaaatgtacattttattattattattaattattattattattattattattattattattttagaaacaggtcttgctctgttgcccaggctggagggcaacaatggtgcaatcacagctcactgcagcctccacctcctgggctcaagtgattttcctgcctcagcatcctgagtagttgggactacaggtactcatcaccacagctaatttttatttttgtagagacagcgtctcactatgttgcctaagctgatctcacactcctgggcttgagtgattctcctgcctcggtctcctaaagtgctaggattatatgtgtaagccactgtgcccagcctagaaatgcacattttagacacacatttactcaactttcctattgcctgcccaggactatccaactgtatttttgtgcctcagagtcctttcacatgttctgcttttactgggaactcataggcagtaagatcaaatgctgacctttgaggcatctacgcacttccaaaatctgcttcctctctcatttgcgactttatttatttattttttgagatggagtctcactctgttgcccaggctggagttcagtggcacgatcttggctcactgcagctctgcctcctaggttcaagtgattcacctgcctcagcctcctgagtagctgggatcacaggcaagcaccaccacacccagctaatttttatatttttggtagagatgggggtttcaccatgttgaccaggctggtttcaaactcctgaccttggcctcccaaagtgctgggattacaggtgagagccaccatgcccgtcctcatttgccactttaaattggaggagatgaaaaaattatgtatcctcaaaagctcagggtttcctatttgggacttcagttacagagattcatttttttgtttccaagctgggtgtagtggctcacacctgtaatcccagcactttgggaggccaaggagggaggattgcttgagcccaggagttcaagaccatcctgggcaacatagtgaggcctcatctgtactaaaaataataaaaaaaaaaattaggcatggtggcactcgcctgtgatcccagctactcaggaggctgaggtgggaggatcccttgagtctaggagattgaggctgcaatgagttgtgattgcaccactgcactccaacctgggtgacagagtgagaccccgtttgaaaacaagcaagcaaacaaaactatttgtttccaaatggcacgcaaggaagatagtaatctctgagtgttaagccagcagattttgccacttcattttgtgtgctaactcaagaaatcaggacacctgatgagttgaggtgttcaaggtaaagctctgctatgccccctccttcataggctgttctgcttgggcctcccagtaatggaggactacctcttttcttgctagagtctctacagttttcttttctttttttttttttaattttttttttttttggatcttaccctgtcgtccaggctgtggcacgatctcggctcagtgcaacctccgcctcctggtttcaagtgattttcatgcctcagccttccaagtagctgagattacaggcgtgtgccaccacgcctggctaattttttgtatttttagtagagacggggtttcaccatgttggtcaggctggtcttgaacttctgacctcaagttatctccctgcctcagcctcccaaagtgctgggattacaggtgtgagccaccatgcccaggtgaatggaatagtttttcattcaccacagtttgtgactgtctctacattgtgaagtgacaagttctcttctcttttccttctgcccctcatcacctttttcttcctcatttcttttttgaattttgctgtcttgaattgatgtctaaaggatgacatagcagacaaggggcctgacacatgaactctcatgagttactgaggagtttctcagtgctctgtctgcatcatctgctcgctctctccttcctaggtgctagcctgccaacctgctttgagaaattggaaatgaatcggggggtaatcagcctccccttgtacatgtagggaccgcatctccaatgccttgctttacacaataacgaatggtgttttgcttacctacttccacacaaactgctgatatggttaggatttgggaaaggggaagaagggaattttgggttttgaggagtagctggggcttgaacaaagaagaggtagtaatgaacattcctggggtgaggcaattagttagctgagggagaagaaggcatataataaattagggattgacagactgtctgtaaagggccagacagtaaatgttttagtcattgaagaccttaaggtctctgttgcatctaatcaactccatcattgtagtgcaaaagtaaccacagccactacagatgtgaatgaatgtgactatgtttcaataacattttctttttttctttctttttttttgagacagtgtcactctgttgctcaggctggagggcagcagcctgatcatagcttattgcagccctgacttcccaggctcaagtgatcctcccacctcagccttccaggtagctgggactacagacacacgccaccacgccccactaatttttgtattttttgtagaggcggtgtttcaccatgttggccaggctggtcttgaactcctgaacttctgggctcatgctatccaccctcttcggccactgaaagtgttgggattgcaggcatgagccagtgtccagcccaaaatagtcttttgattttttttccccaaccatttaaaagttcaaaacattcttagtttttgggccgaaaaaaaacaagtgatgggtcagatttagccctggattgtggtttgttgacccctgtcatagaggaacaggaagcagagaggactggttatagggcctgggaaaccaagccagggagttagacttaaggtagtgtgaaagaggaaaccatttttgtaatgtaatgaaaaatttaaaggaaggatattttgtatttatatgtgttcctggaaaatctcagtttttattcaaacattttcactatggaaaatttcaaacatttacaaagtagagagaaaaatgtaatgaaataccaagtgatgtatttatcacctaccttcaacaattaccagtcctaggtcctttgcatttctgttttagaatcaacttgtcacattctacaaaaaagctggctggaatttctgtcgggattgttttgagtctgcagataatttcaggggaagaattgacttcttaataaaattgaattttccaaaccatgactatgttatatttctcaatttatttagtttttctttaatttttctcaacaatattttgtagttttgtgtacaaatctttccagttttttgaagggatgtggtcagatttactcctatttcatatattttgatactgtgaatttcagcttccagttattcattgctaatatataaaaatacacttggtttttgtatattaatcttgtatcctgagaccttaatgtaatttgttttcaaagcttttttgtggattccattggctattctgtcaatgttgtctgtgaataaagacagttgtacttttttcttcccactctgaatgccttttatttatttttgcttcctttactgcactggctagaacttctaagtacataatgaatagaagtgtaactgcccaatgagttcaccttgcccattgcctagacagagccgattcaccaagacgggaattgtaatagagaaagagtaattcaggcagagcctgctgggtgggagaccggagttttattattgctcaaatcagtctccctgagcatttgaggagcagagtttttaaggacagcttggtgggtggggggaagccagtgggccaggagtgctgattggtcaggggtgaaatcaaaaggagttgaagctttcttcttgagctgagtccgttcctgggtgggggccacaaggtcagatgagccagtttattgatctggatggtgccagctgatccatcaagtgcagggtctgcaaaatttctcaagcactgatctcaagagcagtttagggagggtcagaatctttagccttcagctgcatgactcctaaaccataatttctaatcttgtgtctaatgtgagtcctacgaaggcagtctggtgcccaggcaagaaggaggtctgctttgggaaagggctgttaccgtctttgttttaaactataaactataaactaagtttctcccaaaggtagttcagtctacacccaggaatgagcaaggacaacttggaggttagaagcaagatggagtcagttaagttagatctctcactgtctcagtcataattttgcaaaggcagtttcagtcgtggtagaagtggatttccttgtctcatttttgatcctatggggaaaatgttcagtcttatgtcattaagtatgatattagctacagatatttcatatatgctgtttatcaagtttagtaggttctcctctatgtggagttttgtattttttaaataaggaatgaatgttgggttttgtttagtgtttttctgtgtgtattgagatgatcatatggcttttctgttttagtttacaatgttggtgagttacattgacttttgcattttttttttttttaagatggagtctcactctgtcacccaggctggagtgcagtggcgcaatcctggctcactgcaaccttcgcctcctgggttcaagcaattctgctgcctcagcctcccaagtagccaggattacaagtgtgcaccaccacacccggctaaattttgtatttttagtagaggtggggtttcgccatgttggccaggctggtctcaaactcctgacctcaagtgatgcacccatctcagcctcccaaagtgctgggattacaggcatgagtcactgtgcccggctgatttttgaatgctaaaccaaccttgcatttgtgggataaaccctacttggttatgatgtattatcctttttttctagattgttagactcaatttgctaaaattttgtttgtaatttttacatttattttcacaagagatatgggtctgtagttttgttttatcatagtgtctttgtcagattttggcatcaaagtaaatgctggcttcatagaatgagttgggaaatctctgttttctggaagagtttgtaaagaatttgttttatttcttctttagtggaattcctgagtgaatccatctatgcctggagttttctttgtagaaaggtttttaactacaaatccaatttcttcaataaatatagagctattcaagttaccacttttcgatgagcttcagtagtttgtacttcaagaaattcatttattttatctaagttcttgaatttactggcataaagtggttcctaatagtcccttattatcctctcatagctgtagaatctgtagtgttgtcaccccttccattccaggccagtggggtgactcatgcagagtagagggagttgatgagaagagaaagggagagacacatagttgccagtatttttcagcagtaattcatgctattcacatcatacctttgattttcgtctgtttttcaagtaacaggctgaggcagaagaatcacttgaaccctgtaggtggaggttgcagtgaactgagatcatgctattgcactccagcctgggctacagagcaagacaccatctccaaaaacatgaaaattacaaataagtaaatgtgaatttcagataaatagcgatgactcttttggtctaagtataccctaaatgttgtctggataaaagacacttaggtgagtgctgtggccaggaaggcaagagggatgggggaccaaccaactagagacaagggaaggtatcactaaggacacggcagtggaactgagtcctgaagggacccacgagcaattatttctcagggaagaaaatggtaaggggttttcaggggtaggaacagtaggagccaaagtgtgggtatgtgagagtgtgtgactatgtgtgcacgtaaaatggaaatgagatggagggatgggttggaacctggattcgaagaagcaggtatcggccctggggtatttggcctgggacagtgaggcattattttacaggagagtggcctggtgggatgtgtgctttagagtgtggacacacagctgtggcacagaaggattgctggcaggggagggcgacaggaggctgccagagttgtccagctggacttcttccctgacacagacaggctggcataggattggtgtggtagtggggatgggaaggagggaatgccgcgaggtcaggaacttcctccagtcgccaagaggcgtcttgaccgtttaaaaatgtctctgaagatttagcacaccaaggccccctatagtcccagggtataggccacccttgagattagaaagaaacccctgggagctgtggtggggtgggtgtggctgttggaggtgtccctattcagactcctgctctaccatttgctttgggatcaccttttacagtggatctgatattataatacccacttcttatgatgaaaaggaactgaatgagtgtggaatccctaggaccccgctggaatataatgggccctcggggtttagtttctttccttcttgccggtgaggtttgagagggactggagaacagtggatttcgaccatccatttggggttgtcagtctgtgccaggccagctggagactacaaaaaggaggtacaggtaagcaatgaggccctgtggttcattctcagatttcattccaggagatcagagagagccttttctggaactgtatcctttcttgggaaatatgggtggaaatccaagggccctgtgcatagattttcccttctctttcagctttgccagctgccagaactgtggctttctcagcagattgtctgtacacatgagaccttttttacggaatggtttacagaaagacaaacccttccttccaagtttaaccagtccccttataccaaggtttcccaaccttggctgtattgatattttaggctgtataattctttgtcgtggggggctgtccagtgtgttgtagggagtttactaggattcctggcctcttacacactcactgtctgtagcaccttgcctcccacccagttgtgacaaccaaaaatgtctacagacagtgccaaatatcccctagggtacaaaattatcccctactcctcattaagtaccactgctttatactcactagacacaaggagaaataactttttttttttttttttttttgagacggagtcttgctctgtcatccaggctacagcgcagtggcgcgatctcggctcactgcaagctccacctcccgggttcatggcattctcctgcctcagcctctcgagtagctgggactacaggcacctgccaccacgcccggctaattttttgtatttttagtagagacaggatttcaccgtgttagccaagatggtctcgatctcctgacctcgtgatccacctgcctcagcctcccaaggaaaaataacttcttagcattttttattaatttctttttaacctaaccagtgaaatgcttgttgaaaaaaagtcttctcttttactaaactgaatttgaattccaatctattttaacttatttagtttagaaagacttcctttgcaccactgtcaaactttcaaatataaaattttgttttttgtttggacatagtcttgctctgtcgcccaggctggagttcagtggtgtaatcttggctcactgcaacttctgcctcctcgattcaagtgattctcctgcctcggcttcctcagtagctggaattacaggtgtctgccaccacacccagctaatttttgtatttttagtagaaacgggttttcactatattggtcaggctggtctctaacacctgaccttgtgatccgccctcctcagcctcccaaagtgctgggattacaggtgtgagccaccgctcctggccaattataagctttttagaaaggattttttctaagggtggggtttctgagtcactgaaataatttgccatccctgaccttggactgttacaccatttttcctttgacctttgatctgtgatgaagtaacttctggaagtgagatatcaggagttatgttcttgttggtttacacgttattttttacaagaactctataaactagattttatcagttcttttttataggagaagaaacagatttgtagatacataaagtgattaagtgatttgtccagagtcacacaacttggatggcagaactggagcttgaacccaggtctcttgacctttaagttcagttctctactcactgtatgggagacccggaaggagattcttttggtgtgtcacatagccttaccattgctctgtcctatgtaacgtcatcaattatgtgaattatctgacattacaagagtcagaaggtgtcgtagagatgccttagagtccaacttcctttttattgtagatgagaatactgggtggccaagtgacttagattgaagacagcacttgttagaaggaagactaatgggtttcaagtcaaagtcagaatttaaaatatcctgaaggctggaaccttgggctgatttaccaaataaaaattttaacagataaaggtttagattttttagaatacagattacacagcaatgaagaggaaacgctgggcatggtgatgtgctcctgtaatgccagcaacttgggaggctgaggcggagctcaggctgtagtgtgctatgatagagaaaaaaaattaagaagaaaaggaaagaagtgggatgttgcttactgtacagctttttcaacatttctgcatgtttgtaaaatttcataataaaacattaggggaggctgggcacagtggctcatgcctgtaatctcagcattttgggaggctgaggcagtgggatcacaagaccaggagatcgagactatcctggccaacatagttaaacccgtctctactacaagtgcaaaaattaacggggcgtggtggcacgtgcctgtagtcccagctactcgggaggctgaggcaggagaattgcttgaacccgggaggcggaggttgcagtgagccgaggttgtgccactgtactccagcctggcgacagagcgagactccatctccaaaacaaaaataaaagggggaaaaaagagaacagtagcttagcagcagtttgtgtggtaaaagacttgaaaatattagataaccatgaacttatcatgagcctctggaagctcctagaaaagcagattttttttttttcttagattaaggtaggagcagctcagtttctagatcgagggaaataatagtcttgctgagctctgtgcttgccagaccagatctgtcttgtatctgtgcccacttccgaggtgcctgtcatactttgatgccagtgggtacagggtactgaaatctggaggagtggatggggaatgtgtggtgctgacttggaaggagggccagtttagggaagctccatggtggtcttcagatactgggggagttgtggagtgagagtggtacttttattttgaacataaagcttagattaagggagagcaaagacattacagggaattagatgcccattctgttttcctcattcctgaccctcccattctgtatcttcagtacagcagcgcaggttagtctttgggaactgcaagtcacgttataggactgcacggcttttattcaccgtcctgtgtcacatgaagtccagggcttgactggtcttctggcccttgccgacaagtcctcattttgacatttctgtattctagccatactgtattctagccaagtcattagagttcttcagttgaacctgtgtttactctcataccttcgaggtgtacctcctactttgttgcccaaagtaaggcagaactggggatctttctgctcccattgtatcctgtacatatacttgccctgttttttgttttttaaagtaggttcataaaggatggggacatattttgttcatttacatgtcctgtttattcctgtagactgtgaactccttgaaagtaggtatttttgtcctagtcttttttttttttttttttttttgagatggagtctcgctctgttgcccaggctggagtgcagcggcatggtataggctcactgcaacctctgcctgctgggttcaagtgattctcctgcctcagcctcctgagtagctgggattacaggtgcccaccaccacacccagctaattttttatatttttggtagagacagggtttcaccatgttggctaggctggtctcaaacttctgacctcaagtgatccacctgtctcggcctcccagagtgctgggattagaggcgtgagccactgtggccggcctgtcctagtctttatatgcccatatatttccttgactaggttcccagagaattggtgcttggcttgcctggacacggaataaacgtttattgataaataaatgttgtgcccacaatgacttgtctcataactttttagtagtcaggatcctcccacagtagactcttgtaactacaagaatgtttttttgtcgatgttgcacgtagagtttcctgtaaaatggcttccaagatatttttcatttctagtaaagagtctgtgagccgagttttaaatagtattatgtctaccttacgtggtaggtaagagatagccctttgttttcctcaggaggttttaattatatgatctccttgtagaagtaaaggaaactctggagcttcctgtgtggctgtgaatgtgtaattagctttgggcagggctcccagagctgtgaaccctgtcctgaggagcactgggacattctagtgagcgttcaggccacccagattgcagccttgtaaatgaagggtttatttctctaatgagagtggtttgtgtcttcacccaaataatattttaatattaaattatgacaaatattttaaatttaaaagtagatatacataaattagtatgatttttaaaataatttcagtaattgtttaaaaaagtaattttaatacatgtcaataatttattttagactcaaggggtacacgcacaggtttgttgcatgggtatgttgcacgatgctgaggtttggggtacggatcccgtcacccaggtagtgagcatagtttttcaactcatgcccatccctcattcccttcttccaattagtatgattacaactaagaattttacttttacagctctaatttaatacatattgatctagacctgacaataaatattctgctctaagaaaggttttatgttaaataacatggtagttagtcccttcaaaataaaaaatgttgattaagaataccagcaagggcccagcgcggtggctcacgcttgtaatctcagcactttgggaggccgagggcggatcacctgaggtcaggagttcgagactagcctggccaacatggtgaaacctgtctctactaaaaatacaaaaattagccaagcgtggtagcaggtgcccataatcccacctactcgggaggctgagggaggagaatcacttgaacccgggaggcagaggctgcagtgagccaagatcgtgccgtcgcactccagactgggggagaagagcaagacttcatctcaaaaacaaaaagtataccagcactgatgacaacattggacaagtagacagatctagaaggggcaggttgagctgtgtagttttagtgttgttatggtttgtttatatgttgtgaaatattcattgagatcaaaatctggcattcctaacttgtgttatgtgtatgttggaggccatatggagtggcagaagtgaagtggggtttgaattcagaccgttgttcctcaagaatgaattgacctggagagaattacttgcaatctctgatccttagttccttcatctagacatacccacctgggatcatgtgaggatccagtgaactgtacaaggcaccgcacaggacatggtgcttgctgcctgggagaggctgaaggccttcagtgcctttccctgttattttgggagcagtgcatctattttgatgtttttaagaaacactgtttgacaaatacatgaggcatacttcatggactattgtttcagattattcttagaacacagaggcaggatccacaatgtttttatgaggagagctactttttgttcccccaaaccttgactttcctggactagaggtctcagtgatgtgtgctgatgtgacacccttgagcaaagttggagaagagagagtggtaatttccaccacctccccttctccaagacactggaagtgctgtgaactgtgctccttcgctcctccgctctgtaatctctgcctgggggggctctagaggggctctagggaggagtgtcagccagtgattcctctgtctcgaccaggtagggacccaggatcttctggtgaattctaatttgtttttttatgagcctgagggtcatttaaggaatttgtggaagcacttgtgattgtctcaatggttggtgggtgctataggcatttatttaataggtagggcccatggaattcaaggcttaatgtggtgacagttctgtaaaatagaacttttcctatgatctgcacagctttagaatatcctttttttttttttttttttctgagaccaaatcttactctgtcacccaggacagagtgtagtggtgtgatcccagctcactgcaacccgggttcaagcgattgtcctgcctcagcctcccaagtagctggaattaagagatgtgccaccacgctcggctaatttttgtatttttagtagaggcggagttttaccatgttgaccaggctgttctcgaactcctgacctcaggggatccatccacggcctcccaaagtgctgggattacaagcatgagccactgcgcctggcctagaatatcttgatgaataatttatgtagatagaaaaaaactgtttaaggccgaacctataactgaattccattttacataaagggtttttttaaatgtaattttagtagaaatggaaatttcaggaaatgggattaatctagactttgaagggaaattatctcattttgttcttggttttactaagtgtattactagtcttggttctctcaagaaacagaaccgatagcatatatatatatatgtctccagtaggaaagagtgagatatgtttatatatatatagtatatttaactatatttaaccaatatatatgattgtatcatgtgcatcctattggttctgtttctctggagaaaatacaagtattcaccagttgccctttatctatggttttgctttccatgctttgagtacctcatggtcaaccaaggtctgaaaatattaaatggaaaaattcctgaaacaaacagttggtaagttttaaattgtggactgttctgaatgacatgatgaaatcttgtgcggtctcattgtcacacctggaagatgagtcctcactttgtccgatgtagccatgctgtgtgtgctgcctgcccattagtcccttagtcttggttatcagattaactgtctggtatcacagtgcttgtaacccttatttcacttaataatggacccacagtgcaggagtagtgatgctagcatattgtattattgcttactttattattagttattgttgttaatctcctactgtgcctaatttatcaacttaactttatcataggtggtatgtatacatggtccccaacttactgtggttcgacctaagatttttcaactttatgatggcatgaaactgtcacatttttaatgtaatgtataatattcaataaattacatgaggtgttcaatactttattataaaataggcttcatgttagatgatttttgtccacctataggttaatgtaagtggtctgagcatgtttaagataggctaggctaagctatgacgttcagtaggtaaagtgtattaaatgcatttttgactcatgatattttcaacttaatgatatttttattccatcataagttgagcagcatctttatgtataggcaaaaacacagtatatatggagttgggcaatatctgcatttttaggcatccgtaggggttcttgaaacatatccccctcggataaaggggaagcattctatatataacaagatccttattaaaagaattggctcatgcaattatggaggctgagaagtcccaagatctgcagttggccagctagagatccaggagagctgatggtgtcattctggtctggctctgaaggcctcaaaacctggagtgccacccatgtaagtttctgtctgaaatccagcaggctttagacccaaggaaaaccaatgtttgtttcagtttgagtcggacggcaagcagagatgtcccagctcagcagtcaggtgggaggggctccctcttacttagcctttttgttctattcaggtctacagttgatgagatgaggtcctcccacattagggaagttaatctgctttagacagtccattgagtaaaatgttaatttcatccagaaacaccctcacagagacacccagagtgatatttgaccaaaagtctgggcaccccatgatgcagtcagaagacacataaattaaccatcacactaagagtgattcatctttttaggtaaatgaagaatcaatcacattattgatagcattcatgataggtagtgtggtatctgagttgccaaaatgacatacccaaatgaagagtgtttgtagctgtgaaattcagtgattcaacttagagatgtggatttctgaccattctgcctgaaaatttacatattgaaatttatatttattaaaaatggtttttatattatagttgctgtgttaagtagatatttttggaagatatatctaataaataagttatttctgaatttcatttcaggataataaaggtatattttcaatagtttttaaagaaaggggatgaggcatgatagttcacacctgtaatcccagctactcgggaggctcattgggaggatccaatgagcttggaaggtcaaggctacagtgagccatgattgcaccactggacttcagcatgggtaacagagtaagaccctgtttcaaaaaaaaaaggtgcgcagggggtatttgggtctgatatggctaagaaccggcggtctaagtgatctcaagctgccagcctccttgagcagtctgcatctcagcatctttaaagctttgactgtgtttcttttctccgcttggacctctgcaaaaccgtagtctttcttcttatcaggtctttcacagtgttgggatatattttccagaaatgtttgttcgatgttgttcattagcttgttttttgtctttgaattttagctttattgatatgtaatttatatgtcatacaatgcacttaaagtgtaaaatttagtggttttcaatatattcacaggattgtgcaactatcaccgtgatctaatgttagaactttgcatcactccaaaaacaaaccctgtatccgttagtagccagcctctatactccctaccccaacccctggcaatcactcatattctttttatctctatggatttgtttctgctagataatttgtataaatggaatcatataatacatggtcctttgtggccttcctggttttttgttctttattaaaaaaaaaaaaaaaaaaacaggatacatgtgcagaacatgcaggtttgttacataggtatacatgtgccatggtggtttgctgcacctattgacccatcctctaagttctctcccctcgttccccaccccacaacaggccctggtgtgtgttgttcccttctctgtgtccttgtattctcattgttcaactccacttatgagtaagaacatgcagtgtttggttttctgttcctgtgtttgctgaggatgatggcttccagcttcatccatgtccctccagaggacatgatctcattcctttttatggctgcatagtattccatggtgtatatgtaccacattttcttcatccagtctatcattgacaggcatttgggttggttccatgtctttgctattgtaaacagtgctgcaataaacatactgtgtgtgtatacatatgtaacaagcctgcatgttgtgcacgtgtaccctagaacttaaagtataataaaaatatatatgtatataaaataagcataccatatgcatgtgtctttacagtagaaggatttgtattcctttgagtatatacccactaatgggattgctgggttatttctggttctagatcgttgaggaatcaccatactgtcttccacaatggttgaagtaatctacatttccaccaacagtgtaaaaacattcctatttctccacagccttggcagcatctattgtttcttgactttttaatcatcgcaattgtgaatggcgtgagatggtatcatagtttcaggtttaaatctacatttaaatctttgagttgaattttgtatatgataacagtctagatttattcttctacatgtgggtgttgggcatttcctagcacagtttattgaagagattgttattccagagggtgtgttcttggtgcctaggttaaaaatgagttgactgtaaatgcgtgaatttatttctgagttctctattctgttttcatttgtttatgtctgcctgtcatttgtctgtctctctctcctgcccctttttttgacagtaccatgctgttttgatattatactatagatctgaagttactatggatttacagtatattttgtagaatattttgaaatcaggtagtgtgatgcctccagcttttctttttattcaagattcttttgtctctttgaggtgttttgcatttccatgtgaattttagaatctttttttctatttccatgaaaaatgtctttgtagtttaacatagattgcactgattctgtagatcacattgagtgatagagatattttaacaatattcttctagtgcatggacgtgggatatctttccatttacttgtgtctgctttaatatctttgatctatgttttatagttttcattgtaggatctttcttggttatgtttatccctaggtatcattattttggagggcgggagtgggtagctactgtaattaaacagctttcttgattttttttaatgtgtttcactgttggttcatgtgtgtgctactcatttttgtatattgatattgtatcttgcaactttactaaatttattatttctagtagttttttttgtagaatctttagggttctctctctaggtatatatgatcatgtcacttgcaaacagaagcaatttgactttttttcccccaaatttggatgggttttattgcattctgctgtctaattgctctagctaggacttccattaccacgatgaataaaagtggtaaaattagccacactttaacaagatcctagaggaagagcttttaatttttccccattgattacgatgttagctgtgggtttgtcatatatggcctttattgtgctatgtttcttttgtactcattttgaatttttatcatgaaagaatgttgaatttttttttcagcatctactgaaatgattaaatggtttttgttcttgattcgctgaatgtgatgtatgacatttatttgtgtttattgaatcattctcgtattcctccaatgaatctccaaatattttgttgaggatttttacatctatgttcatcagggatatttatttgcctgtggttttctttctgtgttgtgtcctgggaactttttttttctagcagggtaatgctgacctcatagaacaagtttggaagtactccttcctcttcatttttcggggaatattttgaataaaattggtattacctcttttaaaaatgtctggtagaattcagcagtaaaaccataattcttctgtttttctttgatgggagatttttattactgccttaattgcattactcattattagtctgttcaggtttttttattattctagcttgtgaaattgctatgcttccagacatttattcatttctcctggatttttcaatttgtttgtatataggtgtttttagtaatctcttacgatcctttgtgtttctgtgttatcaattgtaatgtctcctttttcatctatgattttactgcagttttctttctctttttcctagtctcattatagcttgtcaatttttttttcaaaaagcccccagctctttgttcctttgtctttttgtaattttttttttagtttctatttctaaaatttcttctctaatcttcatgacttatttctttctactaattttagcatgtgatttttcttgcttttctcattacttaaagtgtactgtcagattggctatttgagatctttctacttttctgattaggcatttatagctatgcacttcgcctcttaactgcttttgccgcatcccacaggttttgttatgttgtgtttctattcttatttctttcaattaatttttaatttcccttattcgtttcaatgaatttttaattttttcatttattggtggtttgtgggcatgttttaactttcatatatttgtacagtttttaaagttcctgctgttactgattgctagtagtattccactgtgctcagagaagatacttgatatgatttcagtttttaaaaatgtgccattacttgtttttcggcctaacacatagcctatcctgagaataatccatgtgctactgagtagaatgtgcattgtgcagtcgtggagtcgtgcaaagctgtgtacatttctgttcggtccatttggtatagagtacagcttaactaatgattttttcgtggtctggatgatctgcccattgacgatagtggcgtgttgattatagtggagtgtggaggtactctattattattaatatttttttgagatggagtttctttcttgttgcccaggctggagtgcaatggcacaatctcagctcactgcaacctgcacctcccgggttcaagcgactctcgtgcctcagcctcccgagtaactgggattacagacatgtgccacctcgccctgctaattttttgtatttttagtagagactgggtttctccatgttggtcaggctggtctggaactcccgacctcaggtgatccacccgcctcgacctcccaaagtgctgggattacaggcgtgagccactgtgcctggcgggaatcttaaaaagtttaatacatggaagcagggtagaattgtgcttaccagggacagggaggtgggagaaaaggggatctgtcagtccaagagtacaaagttgcagttatgtgattatagtcagtaatactgtatactgcaaatttgtgaagagactatatttcaggtgctgtcatctaactatatgagaagatagatgtgctcattagtttgtagtaattatttaactatgtgtatatatatgtacacacacaaacacatatatacattttcatatatatgaatcaaaacaggctgtccacttaaatatattcaattttattttaaaaataaaaatgagacaaagaaaaaaagcatgcatatagtcttaaactcaattaccaatatatataagtgcacagctaatcagagcagtgaattaaatgtcagttatatttgtttatattgtaacatttcattttcgtatgttttctatttataattatgaaaatatttaaagagttcacaatggaactatatattaaatattctcaacatattttagaagtgatgaatgttacaagttttaggtcatagtcactgtaagaatgtgcccttgggaagtgttatcttctgttggtttgtattttaaaacatgcaccactaccaagagagagcctgggtttttctaatgtttacccaccataaataatgttataatgaatgcctctgatcctatatcactatgagcaattaagcatatttctgacagatagcttctcagatttggaattgctgatccaaaatcaatgcattccagaagttagcccagttctaggactggcagagggagagagcctgaaggaaactttggccttggggtggagctcaaaggggagaggtgcactccccatgggcataagtgggggatacctatacccaaactttcacaggtacctagtacccctaaacccagggagtcttttctgtctattctgattgcataggtgcatgatggtgtctttctctccattagttaacgtttactttctcggttctaaaactagttctcggccaggcacagtggctcacgcctgtaatcccagcactttgggaggccgaggcaggcagatcacgaggtcaagagatcgagaccatcctggctaacatggtgaaaccctgtctctactaaaaataaattagctgggcatggtggcgggtgcctgtagtcccagctacttgggaggctgaggcaggagaattgcttgaacctaggaggcagaggttgcagtgagccgaggttgtgccattgcactgcagcctggtaacagagcgagactccatctcaaaaaagctggccttccagtgtccaaaatgctgtcatctcttcttccacagtttgtctatgtgggtttgtagctttaaaaactttatttcatggttttttttttttaaggataattggcggggggaaataaaaaattttggatccctcttctttcacaggaagtggtgaacgatttttcatttacacaaacatttaaaaacaattttttctaccttttgacagctacattgcttcccatagtgtaatactcaataaattatttaaccatctactattgttagccattcaaatcatttcctattttatactattgtcaacttcactgaggtgaccatctgatacatgtatctttgggttcattcagaattattcctagagaatagtgctttaaagtaaaggttttattattatttaggtatggcagggccaacagatcagatgtcagccattgaaaaagcaatttgggccgggtacggtggttcacgcctgtaatcccagcactttgggaggccgaggtggatggattacctgaggtcaggagtttgagaccagcctgaccaacatggtgaaaccctgtctctactaaaaatacaaaaaaaatagctgggcatggtggtgggtgcctgtaatcccagctacttgggaggctgagaaaggagaattgcttgaacctgggagatggaggttgcagtgagctgagatcgtgctagtgcactccagcctgggcaagaagagtgaaactctatctaaaacaaaagaaaagaaaagaaagaagaaagaaaagaaaagagtagtttgttacttgcaaatcccaagacaaggggacactccatgccatgggagcaagaggctgcacagagaatgctgcagtctgtcagaaggtggtggggatgggggatgttgcaagaggtgttgctgtggtttccataggaaggaagaggtaaggcaaggtgagcaggttcaggattggttagttcaaacaatttcagtgggctctgtggcatcggggctgttccatctggtacctagccctggtgtgattagggtgtgaggctattagtccagagtgggagagccccataaaggaggtggttggggatgtgggctctggattggtgagtttgtatatgaaaggcacactaagagacaagtggcttatttctaggaattggctaaacctgggaggagcaccctccaggagcagcaaagccctggatgttaaagtatcagaaaggagacaataaagaacatggttagtaaaaaatagctagggcaaaagagatgcccctttgaaatgttaggatagattttgccaaattgcccccaagaaagcttgaactaattgatctctcacatcaatggtgaaagttcctggttttctatattcttgccactaggcactaccactgaaagaatagtggtaaagatccttgcaaattcaataggtgccatttggatatctggtttgaatttgcgtgtcttggtgtgcatgctactgatctgtgaaaatggtattttgtggatgtgaagaccccttggagcctggctggtgggatggagaggactgtggactgtacccaccctgatgtgctcctggcctccatggaaggacagctatgtgggaagtttcagaagggctacaacttccccaccccagctgtgacccagcccacaaaggattctagagatttagtcccttgcatgaccttctaaagtgagaacatagggccagcatcagtagctcctgggatttgggtagacctttctacagtccagctttttggagaagcttaatgtcatttatgcttgctgagtcctgtgtaagccccaaagccaagcttttgcaagcataggacttaggcacctttaaaaaggagttgtttaccttctaccctcctgaagagtgtgtaggagtttccctttgagaataaccactggtcccttcagatggcttggctgcttctgccaggctctacttttggaaatgcccttcatcgtgtcagtctcagaattaaagactttcagcatctcctccccattgtccagggatgaagtctgttctccttagcttggcattgaagctctctgtcttccattcacccttccagtccaactggcctccccaagaagcccctgaatctgccttgtaccaatgttaatttcttctctgcctctccaaattttgcccatgtctcaatacccggtaccatcaagagacatcacagttttgggcattgagatatatgaacactgacagttctcagggcaagaaaacacacagcacatgcctctctatggaggccactctattcacctggatgcttacaatgtaatctatagtttgaatttacagggctctttccagattataattcaatcttaacttctctgagtctaaatttttacattgctttctgaatcatctttgttaccattttattcttaacaggctaaaggaagggttaatagagtagtgctaacaaataggatctgggtttataatcaggcttttgtgatttgaatcaaagaaacacaaaaacttagtgtttatcagagtgtagtgcacttattcctggagttatgcgagatcattttagatggcatagaaactataaagcacttatagaatggatgtgtatttattttgctgtgcattaggaaaaaaaaaacaccttactatcgagtccatggtttaatggatattacctgtggcaaggattgctggcaatctgttaaaatctgtcccaccttccttggtacacggccagattacattttccagccttggttgcaattagattgaccacgtgaataagttctcaccaatggactctgagtgggagtgaagagtgccacagccaggcctggcccatacaaatgctccatggtcacacttctgctcctgcctgttccaggtgatggggaattgacacctatggcaactttagaaaccatgagttaaggatggcaaagacaccgtagtctagattaggagtgagtaaactagagcctaagggccaaatctggcccactgtctttttaaaaataaagttttattgaagaacagccatgcctgtttgcataggtattgtttaagggctaccttcactaccacagcagttgtcacagacagcccatggcctgcaaagcccgaagtacgtactatctggcccttttatagggaaagtttgctgacaccttaatttcaatctctgaatgaccatatggaggacagccaccttattgacctgaacaacattctagtcctttacctaagcgaaaaataagccattgaaattctgggcctatttgctaccatagtctaccctgctctcactaataagtcttgctcagcagtctcagggtgattgcctgatgaatgtacatgacccgacttccagttgtttgagccaatgaggctgactagttatgcccacgggagtacaggtctcttctctacgacccaccaccaggccaaaatttcctctagatgctctgaccagtcagtcctaggacctgattgactccagggagtctgaccccctaagtataacacaacatcatgggcctgggaaggtataaacataatacaactcctgcccaatgaactgaatgttaacaggaagatgttccctgaagctcaaggaaatgactttggtgacaatgacccttgccagagccaatgccttgtcacctacctggtggtcatgatggcgatcaagggtgtccctgctttcatgtaactaacttgccttcaatggttcgcttttcccattaagtgactttttttcagttatatacttttgtaaactagaagtgtttttactgtcatttctttatgtactttttatttttaccatcaatttaatttaaaaaactgcactcacacattttccatgcatacctctaattattgcaggttatacaggtcttgcacttatggaaatggtataaagtctcctttttgagtgaacatgttgaagtaaaaagagttacttcatttaaagaaaactgctcatagaagtacagatgatacgctgataaggcaaaaaaccacgatattagtatgagaataactgaggttccagaaacactgcatatgcctaggctgcggtggagaatgtcatagaatcctggattcatagagtgcagagccacagtgaagggtgcttgagagagcccctcccccagagcaaccccgtctttccacaaggaatccccaaatgtcacccagtggattctcagacttctgtcttccagttcagtgttctccaccacaaaatctacacctgatcaatcccatggttcacagacaaagctgagtaaggggcccagtaggacatgggcttgctgtggcccaatgcctgctctaatatgtgctttccatatatctgctggggtaaattgatggaggtggagaggtttgggggagttcatttgaagcccccagatatgcccactctcccaagtcctacccaactgcttagaagttaaggccagttcctaggattttactctgcacatcatgtaattccacatgggaaaccagagggtgttccccagaaaaaagcaataaccccaaccaactgccacttaaacaagagacatactgcttacagctgaagtggtgccagaggtgttacacgtattaaacaaaaatgagatctattgtgaggcttggtatgctccagcctcacccatcacaatctgcagagtcatcacgaaccagaaattggcttcagaggctgcagccagaccctggcaaaacccaggagtggccaaaagattctctgtttgcagaattggctagtgtcacaagcgggcatgtgatcgagcagtggatcaagagaagaactaatccttaccttttatattttgcgaacacagcaccgtaaagtcttcataggccaagagccagggccgtttcccgggttgcaaaggtcagctggctagggcaacaggcaggatggttaacaggcacgtgtgtgtgcgtgtgtgtgttgtgctgagtgagtgagactagccttgcggatgtgtggtggtattgtggtggacctttactggacactctgccggaaaactgaagtggcacttgtgctttagtccagctggatatccctttcaccctggcaattcatcaaccagaggaaggaaaaataagacgtcgtaaagcgagagaagtcccttatgagtctttcgactctcacgtctaattaggcgcaattggagtcccacggggaataccagatcagtttgaagcccgaaatcaaatagctgcaggatttgagtcaatattttggtgggtggacaattaaccaaaatgcagactggataaactacatctattacaaccagcagcgacttattaactacactagagatgctgttaaaggaatagctgagcaattaggggctactaccagatggcttgggaaaatagccttagacatgatattagcagaaaggggaggggtttgcgtcatgattaaaactcaatgttgcaccttcatcccaaacaccaccacccctaagggaagtataacaaaggtatcgcaaggtcggactgctctatccaatgagttagccagcaactcaggggtaaatgacccctttacaggatggctagaaaagtagttcgggaggccgaggcaggtggatcatgaggtcaggagtttgaaaccagcctggccaacatggtgaaaccctgtctctactaaaaatacaaaaaattagccgggcgtggtggtgcatgcctgtagtcccagctactcaagaagctgaggcagaagaatctcttgaacccaaaggcagaggttgcagtgagctaagattgcgccattgcactctagcttgggtgacgagtgaaactctgtctcaaaaacaaaacaaaacaaaacaatgaaaaaacaccataatgtgatactacttcaaatccattagaatagtcattatttaaaaaacagcaacagaaaataacaaatgttggtgaagatattgagaaattgcaacccttgtgcatcgctggtaggaatgtaaaatggtgcagacacagtggagaacaacatgacaattcttcaaaaaattaaacaaagaattacatatgatctagcaattctacctctggcatataccccaaataactgaaaacagggacttgaacagatatttctacaactatgttcatcgcagcattatagccaatagccaattgtagtcaatagcccattgttcattgcacaatagccaaaaggtggaaacaatgcaaatgtccgttaatgaataaatggataaacaaaacataatatatacatacaatggaacattattcggccttaaaaaagaaggaaattctgatgtatagtatagcatataggaaccctgagaccttatgctatgtgaaataagccagccaaaaggacaaacatttgtatgattccatttgcattgggtaaccaaagtcactaaagtagctaaaaagtcacagagacagaaagtggaatggtggttattggggtctgggggaaggaggtgtgaggagttatttttaataggtactgagtttcagtttgggatgataaaaacattctgaagatgtatagtggtgatggttgtacaacaatgtgaatgtatttaatgccattgaactatacacttaaaatggttaaaatggtaaattttttattaagcatatttaaccacaatttttaaaatttaaaaaagtatgccattttatttataaatatttgtgaattttccagatttccttttgttcttgatttctaatttcattctcttgtggttgaagaagatactctgcatgatttccatccttttatatttattgggatttgtttggtggcctaacatatggtttattctggaggatattgcatgtgcacttgagaagaatgtagaatctgatattacagggtggagtattcggctgcatttaaaatagttgatttgaagtctattactttaggagttccattactccttacagctaaaatgtttgttccattactacgtatggctaagatgttggggaagacatttccagaaagaaaaaatcctgggggacggcccccagaaaattatagggagatgggaattttctacctggtcctgaagagcaggcaggaatggaaacaacaactgatcaacattcccagactctgaaaggcaggtgaatggcacagctcaccatggtacagttccatccacacacacctgggaatgccctctccatgaggaaacagaggcagaggaggcagccagtcagtagacaacatggatctccttggccatcaacctcgctgggctgtcgtcctgaagcggggtgctcagagactcacctctatgatactgagctgtgatcagcttagggatcacaaagaacacatctccaagcaagtccagaagactgtctcggatttcagtcagggagtgcttgtcatggaagtattcaccagccacaaggtgcaaataattgggcaggatgtgctgtaaaaaaatcatagtcataggagatccaggtcaaccacaatggccaacacgttaactctgcaggtatgattctgaatgctttacccacattgcttcatttaacccacacagcaaccctgtgatgcaagtatcaaaactagccccatttctcagattaagaaactgagtcttagagaggtgaagtcgttgggcccacctggaagaaccatgattctttcaaaagtgtatttgcatccaaatctcatgctcctggcctctctcttgtgtctcagaatgagccactactggctgcatcatctgtggagctcagtgcaaagtgaagacataggctcctcgttcacaaatcattaagaatttcaagatggtgacagcagagcattcaaccaaatgtaggacccttctgagcaacaaggtcctctgtgactacacaggcagaacatccatgaaaccagtcctgctccggtaccagcgctgcttcctgcacttagctattatcttacctaagctagttggtctcttggagcctcagtttcctcatctctagggatgtggaggattatagaagatatgaagagaaaagcatgctgcttgacccagagcacgttttcagtcctgttggttcacccaggccccattgctgagtgccttaataggacatctgatgcttctctgacctggcaccagcctgcctcccaggcttctccctctcaactttccccaagcacaaatggcaaagagtgcatggtaaattctatgaagattcagggatctggtgctctgggaaatgctggaaaggtgttgcagctcaaacccctaccactaagacagcagcacagcccttgatgggtttctttggaatttggaggcgaggcagtgtacataacattcgggaatgctgctcagactcgtgtatcgcgtcctcaggaggctaatggtttttaatcaggccagagcaagggaggcctctgcagcaggtccagtctatggtgtaagggcctggcctctttggccatataaccagcagaccccatggtgccggaggtgtccaaggtgggtacacatgctgtgtggagtctcaggtaagcccccataggacagtcagagtgcaaagtcctagggttctggagcaaggctatgccttctgtatcagagaactacttactgtttgaaaagtagcccctagcatgccactgcgcccaggagagacacatgcccttccattcctcttgcacttccttgcacaatctacttcccactctacttgaaatgtccttctgctcacttgttcccctcccctaaggctcagatcatcgagcaccttctccataaggccatctccaatccacctgagaattccactgtatgacttacatcatcaatatctctcaaccttagtcccagttcatcatcagacagctgcaactcatcaaacatccctccaccaaggggggcctgagggatctctgcctgtagtgtttctgttttcctttttttttttttttttttttttttttgagatagtctcttgccctgttgcccaggctggagtacagtggcaagatcctgcagcctcaaactcccaggctcaacagtcctcctgccttggcctcccaagtagctggcaccacaaatgcacaccaccatgcctggctaatttttttattttttgtagagacaaggtctccctatgttgcccaggctggtcttgaactcctgggttcaagcaatcctcctgccttggcctcccaaagtgttgggattacaggtgtgacccactgtgcccagtttcagaggactttttttaaaaatagaaatcaaataatgtccttcttccttctgttctcagtctttaggatgaagtctacgctcattattacctagcttacaacagctgaaagcattctctcctgctgcagccaaccctcagctgatctcttcacacccctctactcccagttggtactcttggtttttcacagtttctccacccaccccttccatcaccagacaagctccattaatcctccaaacccttctccccaagagaggcacctgtccccttctgtgggcaccacagggccttggacactcccctgcttcatgtgtgctgtattgaactgtcttgtcatctctgtccaccccacattgcaccccagtgcccagggcaatgcaggggcatgtggactctcactaaacatgtgttccatggacaaatgagcaaaatgaacattagcactgagtccaccctgaataaatgtttatggaaaagaggaagatggaaaaaggagaaaaggagaaaaggaaggaaagcaatccatctctatatcctactgtctagagtaagaccagatactgctgagtttgtgcagtgaatgaatgaattagtgatggaacaataaatgagtgaatgaatgagtaaataactggtcttgtcagaacctggcccaatgcctggctggtgtgtagtgaatacaggtccccagtcccatgtgtgttttagcattcagagtttttcagactgtaggtagacaatgcagcacctatgttgcatgttatcacacaggcttggggtggggtaacaccccaacacccacattaatgcatccacagagaaacatctgaatactgggataaataaaatgaatgaatgaatgtgtaagaacaaaaatgactgatagccacaaatcagtcaaggtgtggtttggctgctgggtgggttacaaaaaccctctgagtttttggagctcttccaggttggggattgtgcattgggattgtgggcctattgatataggttggacctgtgtcccccaccaaatctcatgttgaattgtaatccctaatgttggaggtggggcctggtaggaggtgattggatcataggagtggtttctcatgaatggttagcaccattcctttggtgctgttctcgtcatagagttcccatgagatttggttgtttaaaagtgcgtggcaccacctccctctctctcttcctcctgctctggccgcgtaagacgtgccttcttccccttcgccttccaccatgattataagtttcctgaggcctccccagaagctgaacagatgccagcatcatgcttcctgtatagcctgcagcaccatgagccaattaagcctcttttctttataaattacccagtctccagtatttcttaatagcagtgcaagagtggactaatacacctatgcttagtaaaggtctactgaatgactgagtgagtgaggagtgtctgtgcccctggctgctcccgctgagtgtgacccagggctatctgtgaaagtgcatgtgtctctagagtactgcagcctcccaagctattcaccaggatgttttgtgtcagacagagggcaagggacttgttggagccactgagaatctcaggagcctccttctgtggagagaagcagtgccctccataagccatctggtcatcagaaggttaaacccatctccctgagggcctgggcacctgactttcacaggggaagctgggaagggcaggagccctccagcccaggcagccacgtgtggaagtggcctcagtgtgctgctcagatagttaatttcttcttctcacttttgataaaaggcagctgttccctgtcattccacctgcagccttgtggggcccgagtggccaccttgtgggaaggctcccattatgagctaagttgtggccccctcaaaattcacacattgaagtcttaaccccccttcacttcagagtgcgactatttggagacagtacttttaaaggggagattatgttaaaatgcggcgttagagtgggccctaatccaatctggctaatgtccttatgagaaaggaacgtttagacaaacaaagcaatattagcaccttgatcttagaagtccagcccccagaactatgagaacatgaatgtctgtcatttaagcctcccagtctgtggtattttgttatggtagccctgactgcctaagagacaccaacttggctttgacaccaagttcaaagagaagccagaaaatttcaaaactggtatttgctgttctccttctaacgacctttgcgggtggggcctctgagaagccacagtgggaggtcaggcagtagcagtgaggctggtggccaccagctgagaacttggcaagggactcaacttttcctgtctcaggctcctcatctgtaagatggagtttgcaacaggtacctcctgccagggtggtgatgagaactgaaagagttgatatttgtaaagctcttacagtggtacttggtatatagtaagcgctttgtgtgaatatttgtgaaattaccattttctggcaaaattacagctttaaaatgtgaggcagcagaaatactatccacctgacaaataaattttcttggtatgttttctgctgaaaatcttggggtaatgaatcactagggccaatacttaaatgaatactagggccatacctgtctcctggaatctcaggggaacctcagagtcattcatgttacctacaagcatattctaactactaaaaaccttcttgtacattaaggagctgggatttgtttctgggggatttcctgtggtttctaacagctagcaatgggtttaactgcaaattcacatggaatttcagcacccacacaggcttttgagctctgcaaattctgtcagttgaataactccaatatctagcatttactgaggactgactatatgccagactgtttgatgtatagctgtgaggtaggtgctaagaatagccgtatttcacagatgaaggaatggagactcagagagggtaggcaacttccctaatgtcacacagcaggtaagcagagaactcggcatttaaaggcagaacctagtctgggcacaggctcatgtctgtaatctcagcactttggggggccaaggtgggtggatcacttgaggtcaggagttcaaaaccagcctggccaacatggtgaaaccctgtctctgctaaaaatacaaaaaaaattagctagtcgtggtggcaggcacctgtaatcccagctactctagaggctgaggcagaagaatcgcttgaacccgggagatggaggttgcagtgagccaagattgtgctactacactccagcctgggcaacagagtgagactctgactcaaaaataaaataaaataaaataaaaaacagagcctaaatgcataaaaattacacaccagtgtctccttactagctaggagatgctggaaagccactttagctgctctgagcctcagtttctttaaaatagggataatcatgcctgttttcaagttcctgcttggattgcctgtgcttggcactagaaggcattggggaactggttacagtagttacagtggtggttgtcatcactagcactgccttcttctttctaatacacacccagaaatcactgaaaggccttacctaagccatcaactgtgattcactggcctcatctgcaacatgaggacaaaaatccctagtcccacttgaaaacattgccttggaggtcaaattaataatggtacaacatgctttcacaacccaatgaactcgggattctggttctagcagccatcaactagctttgtaatttgacaaacctctttatttcttaaccccatttcccccagcttaaaatgaggtcagtctatataaatgagcttcaacagtattaggaatttgaagcctccactcttctgaggacagatgaaaagtttatttccaatgaagagagtcttcctaaaccatggaatcaaaaaatcatgggtttttcccggcacccaggcctcagctcaacaatctctcccccagaggagcctttcctaaccacctgttgtctccctaaagataacttctctccccacttgtgcccttcatagcatctatcactctccgaaatcatcttctcaacctcgtgtctcctctgtctctccccactagagtgtaagcgctcagaaagctggtaccacgctcgctgccaactgctcagtttttataagcctgtaataaatactcagcacatacttgttgaataaataaaatgattcaacaattttgcaacttatacaaccttagcattcttggatgtcaagatgctagaaccaaggctggacatgaaaagtttaaaggactgaagtttttcaaacctatctgaatgtcaactctgaagtagtaactgcattttttggaaacaataatttatagtattttttgaacaaagaccaaatggacccatcccctctttcctttttatgtagttgtttcttccaccctaaacctcatcacatgaggagcaaggcagacacttgctgtgactggcctggcctggtcctcgcttatcctctttcagagagaggaaaggtgatcactgtgtgcttggctggtgggctccagcacttacaacagtggatgtcacctgtggaaatgcccagctgttgaagccaagagctgcatcacagtttgagggagtggcagtatggacagccacaattcttaccataggcagcgggaagccacactcggggttattgactccgatgatggaaggaattgctttaaatgctttctgagacaatagatctagaggctcattaggaaagaaagcaccatcaaccacttgagtgaaagcctttgttttctgtaatagggaagaaaaaaaaaccagcagctatttctgttcacaaaatctgctgtcccaaatcctggccaagcaaagccaacccagtctagcactggcttaaatgcacttaaaaagtaaaagcaaacactatgggcccagctcaatatatcagtccctggcagctctgccatgtacctgggcaagggggctaaacttgtgtgtgccttattttcttatctgctaaacgggaatatctacctaagaaaaacagtggcctcggatatggtttggctatgtccccacccaaatctcaaattatagctcccataattcccacatattgtgggagggacctggtgggaggtaattgaatcatgggagcaggtcttattcatgctatttgcatgatagtgaataaagctcatgagatctgatggtttttataaaggggagcgcccctgcacaagcttttttttttgcccactgccatataagacgtgcctttgctctttcttcaccctccaccatgatgtgaggcctccccagccatgtggaactgtgagtttattaaacctctttcctttataaattacttagactcaggtatgtctttattagcagcgtgagaagagactaatacagcctagcacagagattctcaaagtgtggttcctagaccagcagcatcagcatcatctgggaatttgttagaaatgcacattctcaggtccacttcaggccctcaataagaaactctagggtcggggtgtagcccaggaaccttcttgtaactgaaatgcctaaccttgtttttactttaactcgttactttgaattttatcctgcttgtctctttaatcacctagccttgcttctcatgtaaataagactctctccagctaggaaggctggacaaactccagttgatcccttaatttacaagacactgagggctcctcatccaacaccctttcgtaaggagttggcctgtgtaaacagatcctcagcatttcaaaggagcccaattaactgataaggtactagcaccaacaatgtatgaagttcccaggatttctctccaagagataacaacataaaaccttgagttcatgccctgcatagactctatatctaattataatgaaagatttagaaccttgcacctgataccgttgctcttcttgtaactatttgtcttttgtttatcactctgtaaccattttgcttcttttgattcttgcatgtttttacttctgtagaattattacatttgagtccccctccccttcctaaacctaggtataaaagttaattgagccccttcctcgtggcagagagaattttgagcattagctgtctctctggccgccggcttaataaaggactcttaattcttctcaaagtgtggcgttcccttaactcacctggatacaacataaccagtcctccaggtgatcctgatgcatgttcaagtttgagaaccactggccaaatacaaagggaaaaatggtggtagatggagtagctaggactgtaggggttggtgtgaacacctttctcagatgtctccctgagacacagtgcctgggaaatgcctggatatttctggggtctcagaaagcaacactcagctctaatcacggtttcttcaggtttctgttttgggatttgggtagaaaggagcacatggaagagttcaatacaacgtcaggtccaggacttatccatttcactgaggctagcatggctcagagtggacattcagtacacagcacctaactagcaaatgttgaaatctgaaagataatgatcttgttcattcaaagactgtcatcaaaggctctcaaggttggaagggacataaaagatcacccggttcaattaactgtcactgattgaaagtctgtcagtggtcagctatattttgcttgaatacctggagaggtgggcatctcaccaccttctaaaggagcccagtccttttccagacaactgaggtcttgaaaagttttcagttacacaaaactaaaatgacttctgaatagaacttctagcttgtgatcttgacttcagcttctggaagcatgcataacaagtgtggtccctctctccagtgagatgccttcagggacttagagacaagccttgtactttgctgaatcttctccaggctaagttgcacccctgccccaacaatgttcttaaattacctacaagggttctatacccctacttattttttttacagctgttaccaagtatccccagtcctcctcttttccatgttccaaatccaaataaataacaaaagggtaggatttgttcacctctctattcaaagggcaaccctgtccccaaaactgccccctctgtcctcacctggctgagggtcagcagctccttggaggattttgtcctcaggcacctcagtggggcctcagagtctgatgcattgtacccacagaattgtgcaactacctgcagctattttcagagaaagaccaggtcagagcatgattttgaaagcatctaggaaaatgaaacctggaaaatgccctcctatcagccacaggcttgtcctccatatataagtccatcctgctacccctgcctagccccatgcccctataaaggaaggtgcacgtggcagacaggttgccactgcctcaccctcactctcttgcctggctcgccttgtcatctttagaaaacaccacagctggggatgggtgtttgtcagtctgtggatatggaatggaatcaagattcctggtcacaaagagatcagtcctgtgaacttggctgcattggtacttggctcctccagagtctagaagcccaaccttgaggtgctaaatgaagacagaaacaccaagagcgaggaacagctttgcaagctccttcagtgtcagtagaggcagggctccagatcagattctcagcttgtcagccctgcccaagccccaggcccactcacagcctggaatgtcctacctgtcttttttcctgcctgtataccaatccttctcattctttaaagcccaagtcctgctctccacaatgtcctttcagggcactgcagcccccagaaacgccttcctcatccaatctcctataagctcgatgttccccaccttccatgcctggcccattgctgaacacctgctttccttgtcactgaaccttccatatttgtagaactcactccctgaaagtggtggctcttaaccttctgggagtcgtggatactgtgagaatccaatcaaagttacaaaccccctccctgggaaaatgtgcaggcatgtggagtctggtacaattgtgggaccacttcccaaaccatccatggattccaggatttaatcctatccatggataggtgataaaaagattatattgccctcaggtttggatatgctttctccactgataaatcccaaagttctaacagagcagggaaaatagtgggcattcagtgatgtgtcaaatgaataaacatatgcccaaactgaaagcagctttatggagaatgttaccaaaatcaatgtttccacgtattgagggtatttttttttacaatttcataactctatgtttctgctcttggttatatactgttactttctataaaatgtttaagaaaatttaccactaaaatcattaatactcaagagatggctccacagcccagtgcttaattaatatgcattgaatgaaacagctcattcattagctcattcatccagaacatttatagctgcctgatatataccacttattatgctgggggcctgaaggacagagagatcctggtctctagggcctcactctgtagtagataattaagagacagatgacaaatatcgtgggatagatggcacatggtgagaaggtgcctgaacacattctcccctaactgaggagaggaagctagcaaggtgttaacagtattcgtacgtcctcactcttctcataatcatgggccttcaggtaaaggatgatggccaccccactctccatgacggctttgtggaataagccttcggccatgggagacagaatctggagagagaacacagaagatccaggaaaggttacgcagaggactccccaccgatcacaaataccattcatccctcttcaaagaaaccttcccaggaagcctccataaaagctctaaacttagaggggaaaaaaaaccctttttggcgggggttaaaggactagctgtgaaggtttgggcaagttacttaacctctctgagccctggttcttcatgaactttgatgtcaaatgttcaggcatgtgatttctagctccttcacttcctagctgtgtaacctcggacaagttgcttaatatttctttttttttttctttttttttttttgagatgaaatctcactctgtggccaggctggagtgcagtggcgtgatctcggctcactgcaacctccaactcccaggttcaagtgattctcctgcctcagtctctggagtagctaggattacaggcacgcaccaccatgcccagctaatttttgtatttttagtagagacacggtttcaccgtgttagccaggatagtctcaatctcctgatctcgtgatccgcccgccttggcctcccaaagtgctgggattacaggcgtgagccgctgcgcccagccaagttacttaatatttctaagtatcagttcactcccctgtaaaactggagtaaaaattgagcccgtatcacaaaattattggaggagcaggggcagtgacaaacatagaagtcttcacaggtggtctggtcaaatttcgttcatgaaataatggctgttataatatatgaaaagttaggttaatataatccactttagaaggtaattttgaagatgtaaaaagaccacatatattgttaagtgctagtcagcagaagctctcttaacaccatgtcactgatttctgcaattaacctgccaactgatgccaaggaaatggtgaccacactgagccaatggaccattttctagcacctctgtccatttctcttctcatcagtttcttgccaagaatcaggtgtgtttgcttccaaacctgttttgtcaactgcacttgttattgtaattacataatcaatgaaatatcatgagaacaaatgaactgtatgtgtaaaagaaaatcaaattatgtctggaaaaaaattcttgataaaggatggctaaaaaatattgctctcgggccaggcatagtggctcacgcctataatcccagcacttttggaagccaaagcaaaaggatcacttgagcccagaagttcaagaccatcctgggcaatatagctagaccccatctctaaaaaaatgaataaataaataaaaattagctgggcatggtggcacatgcttcttgtgaggctgaggcatgatgattacttgtgcccaggagttcaggttgcaatgaactatgatcaccccactgcatgccagtctgggcaacagagtgagaccttgtctcaaaaaaatatattgctgtcgctgggcgcggtggctcacgcctgtaatcccagcactttgggaggccagggcgggcagatcacttgaggtcggcagttcgagaccagcctgaccaacatggagaaaacccatctctactaaaaatacaaaattagtcgggcatggtggcacatgcctgtaatcccagctactcgggaggctgaggcaggagaaaagcttgaacctgggaggcagaagttggggtgagcctagattgcaccactgcactccagcctgggcaacaagagtgaaactccgtctcaaaacaaacaaaaaaagccttatatgtctgtgtatgtatatatatgtatataaatatatgtgcatgtgtgtatatacacagtatatatagtgcatatatgcactatatatgtatatattcttatatgcactatatatgtatatattctacttatttcttgtccacacataatttgacagctatatatatataaatattatctagtatatatataaatatctagtacatatataaatatctagtatatatagatatataaatatctagtatatatacacagtgtatatagtgtatagtgtatatacactactatatatagtatatatactatatatatagtagtgtatatacactatgtgtgtgtatatactagatattatatatataatatatatggtatatatatactatatactatatatactatatatagtagtgtatatacactatacactatatacactatatacgtgtgtatgtatatatactatatatatactgtatactacttatttcttgtccacacataatttgacagctatatatatatctaatatatataaatatctagtatatatagatatataaatatctagtatatatacacacatatatagtatatatagtgtatatatagtgtatagtgtatatacactactatatatagtatatataccatatatagcagtgtatatacactatgtgtgtgtgtatatactagatattttatatatatataatatatatatggctgtcaaattatgtgtgggcaagaaataagtagaatatttgcaggaaaagtataaaactccaaaatgtgctcaggcatctttaagtttgtgcccaccgtaaagaaactgaaactgcaatttgaggacagcaacatttgcagtggtttatgcaagataatccatgttggaactccagtcagcagaccagctctgcaaacataaggccctgtatcaaactgttggtgagggaatgtacattttatggtttaaattaagttaaaataaaattaaaatttaatatttatatgcatcttttgatatttcatgctttagctgagttttctattaaacaagtaattaccgctctggtaattgaatactagggtttctcctctacaaatataaaggagttttcctcaaattattactcactatgtgatcttgggtgatttatttaaagtttcccagtgacggctatcttgtccatgaaatcagactgagctcctaactcatgatgtgtttgtgaggcttgaagaagacaatgtgccttaaagtgtctgttgtgcatgaaggcaccaatcaaatgttagtgactcctcatcatcatttttggacctcccacactgagattcattcaaatcacaaagcagagaacttacaaggctggaaacacttatggctcccacggactcaccaaagatggtcacagagctggggtccccaccgaagaactcgatgttcttctggacccaggatagagcagccacctggtccttgaaggcccagttcccgggagcgtgctgatcccatgtgctgaggacaagaggcagggtgagaattctcagttggccatggcgtgtttcccacagccctggaagttctcagcagaggctgtgggcagatgtcagtggggaggggactgagagtcagaggtctggaggagctggggaaaccgggctcagttctcacactttgctgggatttggatttgagaatttgatgaaagctatgcacccgagaagaacgcacatacaatactgtaggtgcaatttcaagtattcataggctcctcagaatccatgaatcccagtgcgtgaatcctgtgttgcccaggctggtctggaatccatgaatcctttcctgagagttggtctgtactagaaagcaagggttttctgagcacagaattttccatgaaactaaattaataataatcataataacaataatagcaggtgcagcaggtaccggacactgttctaagggctttaaggctaatactcctacaaccctcacacctatgaggtagatggtgctgggttttctccctttgcttctctgggtcctctccacccttctctgccctgtcccccaaaagctgacctctaggaatgtcatcacccaggcctcagctgtgtgctgtgagggtgggctagagagagactgggatgtttatcccaccaccccgtgctccctctctgctgggaagtgtttgggcagaggctgcttttctccacagcagcagctcatgccaactcccttccactaaacctgtgagcatgctgtcaggatgatgaatggatacataaactctttaattcaggcactgagaggttaaaccccctggctcaagagctagaaagctgcagatttgggatcccacgcccccatgctgctgctcctgcacaattgcatgtttcctgggatggaattaatgggagaacaaatgaaacaactggaaatcccacagaaccaaagaaatgtctagaccgaaagcatgcacgcagtgcacaccatcagtgcaagtcatcctggggcacattctactccactccattccccagttccccagactgctccttcccctgggttccctcctctatccatgaccactgagctggctctgcctccaccttctctctcccagtcccctgcatctggtcaagagtcaagccctgccaattttacctccattcttctgtggctcccaccctggtccccatttctccatctgtttatcctgagaagcattataccttagtggttactatctcagcctcgagcacaggattcacagcctggccacttatcatctgggtgaccttgggcaagtcacttaacctgctgtgcttcaatggttctcatgtctaaaatggggatagtgcccactccacatggttgtgaagattgacggtgccaggcagacaataagcatgtcatatacacctgttatatacatgttagctattgcttttgtggttcaaccaccccgtggcccgcatcaagacggtgcctcccattgggggtccgtatctgcagctgggcacccctggctcagcctccgttctgctctggaggttcctggtacactactctgagaaaggtactcctggtccctcaatctgtattggataaagcccaaactccatttacggcctggcattcaaggtctttccctgtcaggcctgtccttgcctttctgcatccatctcctgctgtagcttcatctacctatgctcaaaccagatatgataaacaattgttgaaaacgttcctatcaaaggaatcttacgcagaatcctaatgtatagagcagctagaagtgtaattgctcgggtcagggcaccccgtcagcctgtcctgcctgcacagcactcccagagccacattccaggcctacaggcccagtgcagtttgcaaaagtattgcttcatcctcatgtgttgctacctcccttccaacttcctaacctttgcacaggtagcaccctttgccgagcacacgttctctcaaccccttctcctcaaacccaaccacatccttcaggtgcaactccaatgccacccctcttccgaagcctccccaatcccttgcaactcattcctctgtttccgcagccccatggcctctcattcttggagaattaaccatgtccttcttggtaatgtggaaatttttgtccctgcattatgtcccccatagtcaggagcctctgtagggcaggattcatattttgaatcattgctgattttcccatagtatgtgacagtgacccccaagcataatcctggccccacctctcacttctctttgcttacattggtccctggtcaggacttctcctgccatgttttaggcaggataatagaagtggtcaagagacctagctctgttttgtgacccctgggaagttgcttggcctctctgggcctccattttccagctgtgaaatgaagataacaacagagaatcttccttgaaggattattttgaggatgagttgaaataatgcatgcctggttcattgataacccaatacatgttaggcatgattggaggagggaagccactgtgatggagtgatgattctcaggtgagcattcgagaagccttggggtgaggctcaggtagacgctaccaactgctcacacaaacagtgtcctgtcttccagggcatgcagtggggctacattgccccagctcgcttgcagctggatgtggccatgtgactgagttctgccaatggtgagtgaacagaagtgacgagtgccacctgcaggctgggccaggagactctcccttgcatggtcctccatgctttctccgcccacctgccaaatgcagaagatccggggccctagagaatccacatcagagctcaagatgtaaagagccagatccctggctgaccatggggaagaatatctgctgatcagggatgctcaattaaactttactcaagtgagaaaaagatttttattgtgttaagccaccaaaatttggggatttatctgctacggcagcaaaaattacctaaggaactagggccagttttgttcaatgtcctggaaggctcactccttcttaggttgctgggcactgtctatggctactgcactgctgccccttggggatctgggatgtcgatcatttgaagagactcacgtgaagaagccaaatattcccagccggtactggacgatcacaaccagcatgtcctcataggcagccagggaggacccatcgaagatggaggctgagccagtctcgaaggcaccgcctgggaaccacaacaaaacctgaggaggagacaggaatgtcccatcagcccaccaggcaccacctcccctccccatgcagtttggggcacacgttcttcagatgaaatataaatgtcccacttgctaagcagggtgtgatgtttcatcttttgaaggcccagggtgaagcatgtaggctctggcacctgagtgcctgggtttgattcccagctctgccactgactagctgtgtgaccttgggcagtttacttaacctaaggctcatttttcccatctgtaaatgtgaagaaggaaactatctcactcacgaagttttatgaggtttaaacaaaattctatatctaaagctcatagaacagtgagcattagcatatttcaagtttcaaagtgctcagaaattgttcactaaatatcagtgaacctgtgacccacaggaagatggaaaccgttgtaagccatgtctaaaagcaaaaacagctcaaggtgtttcagaggaaagctctctaccttcagagggaggggaggagaggggagaaaaggggaatggagggggtgaggggaggagaagtggagaaaaagaggaggaggagaagaaagaggaggaggaagggagaaggggaaggaggagaaaggatgaaagatgaagaaggaagagaaagaagggtcaggagcggtggctcacgcctgtaatcccagcacttcgggagtctgaggcgggtggattgcttgagcctcaggaattcaagaccaccctgggccaatatggtgaaaccctgtctctactaaacaaaaaattgccgggcatggtggcaggcatctgttatcccagctacttgggaagctgaggcacaagaatcacttgagcccgggtggcgaaggttgcagtgagctgaggttgcaccactgcactccagcctgggtgacaggatgagactctgcatcaaaaaaaaaaaaaaaaaaaaggagggaagagttaaaaactttattgattagaaaaactgggaccagggaacataaaacgttattcggatggcattatctctatttatatatttaataagaaatccgttccattctctttcttagggtcatgttagagattacagcctttggggcaggtaaagagaggaaagccactgaggaaaggggaagaggacaaagcactggctttggtgccagaatctagcacctactgcatgtacaacatggaggaagtcatttatgccattcctgtgcttcatcttctccatctgtggaatgggtccaaatgcatgattatgttttataaatgtctgtatttagccagttcttgtttttctttcaatgcagctacaaggccacaagttatgctatgctatagattatgtgacctatcacgtgagtaactgcttttatttattgtaagtccgctcataaaaacccccgctctctctttgtttaatgctcagcttcttggatatgaatccactgagccggcgcatacctaaaataaacaatcctcctgtttctcatactggtctctccgttcctcagtttaccgcaacagtcctgctcaatgaggtgagggagccacatggtggtgtcagttggaaggcaggccagacagggcaaggaaccaggatcagagaaaccggcttatgtgtggggaggagatccccaggtcctgctcctacttgggctcctggcagctcccagccactgtccagagctgcagagtcagtagcctgagggtggagggagcaggcctgctctgcctgggaccaccctcttcatccctctgcagctgaaggcttcacaccaataaacacatgaggcggcaaggattacggtagtgccgagcagccactcacactttagtgagaattgctggatgaagtagtcctgggctagatcccaggaacatggcaggtcaagttggatggtggagggggttcacccaaggcctggagggtctggggcaatagaagaaccagagactggctcatggggcagataatacccccacccactagcccagatatccagaacacctgcaggcacagggcagactcttgagccaaccccatggccatccacaatcccagtgaggcaggaagagacacagactctgcccacctggcccagtactaagaaacacccctgcctttgcatgtgcgtgcagggtcctcaccccgtgtgtgttgtgggggggtcctcacactccaagtatgggtaacaacccctaatacgtggcaccaggacacagtgggcccgggggggccagtctcggcccagtcgatgtggccacccccagcaccaaggtgccctcactgtgcagggcatcagcaactttgatgagttttcatttaacattctctttatcacaattactttgaaaactattcagtgcagttattaataattaattattatctgctgttatattaattatctggccatcgggaatgtcaccaagatttaaaatttttgttaataatatttcctggacatgggagaggtttcctgcatctccacacatgccctccctgctctgggtgaggctggctagggcccccctgttgtggggaccgcccactctcgctggcaccgcctgcaggctgcccccatcagttcatcctgggccctgggcagagctctgggcaggcctgggtgactgaaccctccctccagctgctcccaccgggccctggtgtgcccatgctcgtgagccctgtggcctatgcaggtcctcaatggcccccaggatggggccgccctggcaccgaggcctgctgggattgcagtgggaggctgcaaagcgcctgccacgtgagaggtggcaccagtggcctgctgtgctaggtcagccccagctgcagattccaggctgctgcactcccacagggcccctgcctagccccgcagcggtctccagtgtcctcatcagccctgtgaccagcagcctcagggagccacaggagacaggagaccctccactgggtgcacacagacaggcctggagaggacaggatgggccacatggacggctggctggggctgcggagcccaggggtggtgccgcaggcactgggaggtggcattatgtgaccacggcagcctaagaccaccactgtgggcccaagctcgcagctcgcttcccactattctcagtgagaggacacaggctaccccttgaggccagcccacagctctcttaccaggcagcaacttaccgcccctcactgtgtcctgtcgctctgctcttgtggcctgctgtgcagcaggcaccatgtcacccgttcatagatgagcaagccaaggctcggggcaggagaccggtgcagcaggctctcaccacctcatgggagcaggctctgcacacggcatgctctcaggcccctttggctgagtgcccagccccaaccccaagctaccccgctggctatccaagcactgggtggagtctggaggagagaatggttaggtgcctcctctgggtggcccctcactttagggaggctcaggggctgtgctccagcctaggtggacatggttgtggctgcccctgtccctcctcctgcccctgcccctcctcccacccttgcctgcttcctctgctccagctcagtcaagaagcgtggggtgctgctgagacagaagggggccagggagaatgcccatggcatgaagtcctccagacctgccctaacctccccctccccactctacaatgcgcaccccataaagacctttgtcaggcaacccctccaatgcaatcagaccagcgtggagcctcctgtgcctgaggaactagtcccaagcaatggcagccctcaaacccactgtgggcttgtcagcatggtactatgacagtgctgatgacagtagtgaggatgggctcagtcacagcgaccatagtgacggaggtgtggtgatggtgatggaggtagtgatggtgatagtgatggtgatggtggtggcgatggaggtagtgatggaggtggtgttactggcggtggtggtgtggaagcggtgatgggggtggtgatggtggaggtgatggaggctgtggtggtgatgatggtagtcatggtgatggtggtggtggtgatgctggtgatcatggtgatggtggtggtggtggtgatggtggtggtcaaaatagaggttatgtggtggtactgatggtgatggtgatggtggggatggtgagggtaatggtggtggtgatggaagttgtggttacagtgatggtgttgattgtggtggaggtgatggtgctggtagtgatggtggtggtggtggtggtggtggtgatgatgccggtgctggtggtgatggggtgctggtggagctggccatgatggtggttatggccgtgctcatggtgacagtggtgatgatgtaaatggattctcctcctggagtttcctggagaaacaacttctctgcttccccagggctgcctggtccctccctgcctgggggtggcccccagaggcaggaagagcagagcgtggactgagcctgacagggcagtcagtatcttgaactcacagagaacatttaatcttagttaaaagtaaataagttcatttactgggaggggaagaagggcccaatatttactgcaagcatgtggagtgattactccaggaggttcccttgggatgccaggctccatccccactcctgtcaggttcacctgtggcaggtgggagggaacggcatgggcccaccctgccctcgggcccccagaggggcatctctcttctaccccccacggcaggggctgcagggttggcaatgcccccttccctccctcagcccccaactcttggcagggccctggcccacggacccctggattcttgcatgtgggcacacctcagcccctggcaggacacccccaggccctcactggctctgttgctcacctgctgtgtgacctcaggaaccctgcccctttttgagcccctgtactcacctaggaaatgggtgataaaggcacgtgcccccggcgggggatggaggttggtgctggtggtcagtgttcccatgacaatgacctattggctgtgcagaaggtgagcctcatcttccaaactcaaggagtccttcatgagcacagccctcagccaccgagatcccccaaactcccatagttcccgaatctccacggccaagtgctgagacaagagccctggggctcaaggcccctcaggcagggtgcggtgagggcccgtcggaggaagggcttcctcctgcccatcctggctgggcgctgtgcgggactgcaggagcctgagttggggtaaaaggaatttcaggggagacagtcagatccaaggtcaactgcccagctcagcccaggactccagcctcttgcaacaagatgggccaggcccctcgctggagtctgctcagcaaggggcctgtgggtccctgggcaagcactagccgggtcctaccctcagcctggggcctccttccagcctcctccctggcgcagcccagctagagtttgttcatttcctgggggctcccgcctccccctcccctggccctgcactgcgtgagggcgcatctcctagaaccagccccccagagtctgctgagattaggagacctggaggttaccccagggacaccctgcccctgtgccccagacaggtgtcccccccactatgggtgatgaatgtcgaggagctgccattataattagtgtggaatgtgccgcctctcccagggaggaaaatcccatcttggaaatacacctcagatgcaagttgaatttcacccacggggccataaaaccattttttcaatcacctggtgctgttgggggctggcaccattaatcctggagatgttatttagagccaagacatcacttggggaaaaaaatcaggtccgcactccatgaggaacccctctctatgccctgcagaggcctcaggagatggacgagactgctcgggcaccaggcagggaggggcagggacgcagctaccctcacagccaccctcacggcccaggagccatgcctcacttcatcagctcctgccagaccctccctaccagagatggccccatcggcataagggaagactgaggccagagaggaatggaggaattggagggctggaacagctggtgggctggacggctcagctccacttgccctgcctgcccccagcagacactgccctcctcttcattcccaaagcccccacccggcccagatcctctcctgagatcagtatcatccaacagccttttataaaaaattgtttccttgattaccgagggtaacaatgaaaacacgtaattgaatctccaagaaattaccatttttataacttgcgcccagttcccgagataaattaaacgcctcccctgtatggtgagccgctcactgcgcatcagagaggggctgatactgccctttatcatcgatgcgggacttactaagaagaatgcctcacactgcctcccgggaggctcctggcacctccagctcatggccctgagcgggcagagttggccagctggaggcgccgggcgggtggtcaggtgggccccctcctgatcactcctggccctgttactggctagctgcgtggtggtgtgggtggtaagtgggagggccagtcagaatcttagcccagactcccaagaaaatcaggcctgtgcgcagccgggcagcgacagctttctgagaagtgcaaccctggagccagagtggggaaaaggcagggaagccgggtaggaggaaggaagtggagatggcagagagggaggatttacccacctgccccccacttgctggccaaagctgaccccacccaattgcgccagtgcccagaggacccaagatatcacaaggtcaggcagcagagcggctctgggggaggcgaggccccgctgaggcaaggcaccgcctggcacagggtccgggagcaggtgggggcagcagggtggccacacccacccaaggagctgctgggttggtcagcagaggggcggggaggtggggccagctaccgggatgggctgtccatctgtgagcagctggtagtgggtttcctgctggcagttgctagtggctggattctcatggctctctggctggctggaggccgtttgggttgtggggaagcagaagcctccagcctgtggactgagtttcctgaaaatgtctgcaggctgcactcagcagagccaacttcaagcaaaggacccgagtgacactattcacgtgcaaaccaccgcccctcccagcgtggctgtttgcctgagggcccagagccaccccctggggaacactgcctagtcagaaacctggcagtggtggctgcacagcgaggaggggtgctgtcaggggacagaggacctgctccctgggaacgggagaactgaggcccaaagagtggcctcccacttgatctaggcaaactcagggtcaagggcaacaggctgaggtcaccaggagctcaaaggctggctctgaaggtgagaccttcttctgaggaagcaagtggcctcaagcagcaccctctggcagccggcccagaggactggagtggggtgggccgggaggaacatcgttcgggacggggtgggtgcctacacccacaactgtgctcctgccttctctccctccctggcctggttcccgacttcccagggtcccctcctgcccccacgaggccctgccgcccaagggcctgcctggatgctccagtggggcttgaaacccccacagtcaggcagcagaccgtgacttctcagctgtgtgtcctggacagaagcaaaggaggccccagaacctctcatcgcaactccaaccaacatgggaatccagggctgcagggggcagcctgcctggggacagggctgggctcagaccccaaagcccagggtctgcagccatcccagtcccattccacagagcctgaggcaccaacctcaacctactcccagccccactcccaccccatgccccagatcccccatcccaccagaatacacccagcccacagcctggctccaaggaacaggcttgtcgggcctgagggcctccaaaagggctctgtctccaggcccggaggagagcagaggccccagcccaggtcagaaaggggcagagtggacgcagggccccagaaggccagcgctgagatccctcccctgccctgtccccagtaaacctctggtgtgtccccttgaggcccccatgagaagaatgaggcaagcagggtggaaatggtgtggtcactccagagcagtggccgtatccagcctcccggccagccctcctccccagaccaaggcccaggtggcatctcccagggcagagccaggaccagcctcccaccctcccctgctgtgggggccgaggcagcagttggaggtgggggctccacctccccagcctccgtcattccctctcagatgactcttcatgtggtttggtttgcctcttggagtccctgcagggtgcccctgctgaccctaagctggcctcctgctcgctgggaacccggccatccctctggttcctggttcttcctccaaatgaggtctctcttagctgagagcagcgcctacacccgggccaccctccatccacggcctcactgacccaggccacagcggctgccacaccctggtcaggggcagtcatgaccttggacaggagctgggacccctcccccagccccagctgcccactgacaagtgggacaacctggggccaggccggggctgcccgaaggctactatgcttgggaagaccccaagacaggagccctgccccttgggaggggtggcaaactgccccgggacagtgccggggtgtctgggatgattcgtctccatgtgaaatgtgggacagacaccctagactcagcaagggaacttctggctacctggtcagcccctgccctaggcctccatgagaacttcggatccaagtggggaggtggctcccccagcactgcccctgacctcccagagcttcccctgctggatgctccagctgcagctcccaaaccacttggcctgctctgggcactgcgtctgcaggggcgtagtgccatctggtggtgaaactgggaactgcaccacagctccagcccgtacctgccgcacacaagtcccggagaccaaggggtggccatggagggattccagggggcctgccgctcctcacctgctccccacccaccccccatctctctctcaacccaggagcctgatactgggacacacagacaggccctgggagctcacagcccagcaccgtgtttcctgctccaataggcagcctagtcccagcaggtgctgggcaggcacagggcagctaaggggacgggtaaggagtcctggctcttggccccagcaaggacctgggagatgaccttggcaccgaccatcaggcactcgccacactgtctccccaggctccactgtctccccaggctccgactagaagggacaggtgggcaggaagtgccaagaaggtggactggccaagccggtgggctcctcacagggaggagcctgggcctgggcaggggtgggcacgttcagttcagccccggcaaccctggagccaggggcctggcagccccagcatggccacctcctggggccttggagccctggacaccctggctgacagtcatttactggggccacattgtccatgagaggtgacattcttatctctctctgattcctaaataaaaaatgtgaaaagccgtgtccagagcctcacccaggagggagacaaatggcctgctatggcccgcaccctgggagcggcttagccatgctggggacggggcagacaaaaggtgagcccttacctctctgagcctcacctctgacatgggaaggccccagggacagggaggtcatgggctcagcatccccagcactctgcccttcccccacaccctgttcccaggacccagccctcatctgttctctgtcccctcgggggtgccccacagggtgggaaggcaggggaggctgcccggcactcggggcatgtgtccactcgccaccctggccctggacagggtggggcactctgcaggccaccgcatccctcacacagccccccgcagacccgtcctcctggctgtgagtctaggggaacctgggaggcccaagaccacccttggagccccatgggccctgaccgaaggccaccacgcacctcttcccctcctgaggcaaaggagcactcacacctcaggccacagcccaggccctgggaggacatgaagggtagtgcccatgccagggcccatggccatttcggccaggtttcctgggacccccaaccctccccatagggcagctctgagggctggagagggagtagaccctgacaggcagcctgggtgggtgtgggccaagagcccaggttaggagggggcacagagatagggtcctctgagggctgtggctagcccagtgacaccgagttccatccactcagggcctgttccctggcttttgagataagcttgggaacagccaagcacaggcaaggtggctcacacctgtaatcctaacattttgagaggctgaggtgggcagatcacttgagccaggagtttaagaccagcctgggcaacatagcgagacccagtctccacaaaaataaaataataaagaattagctgggcatggtggcgcatacctgtggtccccaatacacaggaggctgaggtgggaggatccctcaagcccagttggaggcttcaatgagctgtgatcgaaccactgcactccagcctgggcaacagagtgagatcctgttttaaaaaataaaaatagaaaataaataaaacgagcttagggcatggaacatcaaggcggcagtgcagacagcagaacagccccatctggcccctgccctgcgctgcagcccggctccagcaggaaggactcgggtctccatgctgggcgccccagcctctcctcctctttgccctcccaacccattcctgggcagcagaggaggggcaagggcacagggcagaccctctgaaccaggctcctcgaggccatctggacactgtggcaacatgggcaggaagcggcttccgttgcaaatgatgtccagggaggcgccggcctggcaacggggccacggcccccccagcacactgctctggccacacttttcgccctcgaggccgggagttccggcttccagccagtgcccccgccgcagccgcgccctgtcctgcacgacatcccggagcctggacctgaggcgaacccccacgcccaccccaatccaggacaccgcttggcagggcgcttggcctttgttagcgtatatgaccccgtgagtggggaaccccagggctggggatccagggccccgtctctccaagagtccccccgaccttctcgggctcagggtgattggcaaggatcacagggaggggtgagaggggctgggggaggaggggcttcagggctgagtgagacagcagcagctttccctggcacaggcggggagaggagtgggggcatcagggaacttggggtttccaggccaaggagggtggtgcccagggtcaagggtgacgggaggacactgggccattcagggggtcctgggcgccccctcggggccactggggaagctcatctaggcctgggcacctacggtgggacctaaggaccccgccctgctgttcgcccaggaagccagtgttgtcttccttgctacaggagccacctgtctctgtgaggacctctcactcctcagcatcctggcccctgtggggcacctagcaggctggggacacacagagcaggtgcagcccccaccccactcactcagggacacagagagcagggggcaggccccgccccactcagggacacagagagcaggaggcagcccccgccccactcactcagggacacagagagcagggtgcagccccccgccccactcactcagggacgcagagagcaggggccagcccccgccccactcactcagggacgcagagagcaggggccagcccccgccccactcactcagggacacagagagcagggtgcagccccccaccccactcactcagggacgcagagagcagggtgcagccccccgcccctctcactcagggacgcagagagcagggggcaggccccgccccatgcactcagggacagagagcagggttcatcctcccgccccactcactcagggacacagagagcagggggcaggccccgccccactcactcagggatgcagagagcagggggcagccccctcccctgctgctcaaggcctcctccaccccaccccagggccacctcacctcagggttcctccaagaggccttccttagcccccatcccaagttgccccatggggtctctgagctcagcaaatccggagacccatgacattccagcaaggaatgaacagggcagaggccaggggaggttcctgaaggctgccgccgccctctggcagctaacagacagcctccagtagccagggccaggtatccagccgcctctgctggggaggccccacgtggcactgagaacaggagagaggtcttctgcagacaagatctttcaagacacttcttgaagtggagagcagaggctgacatagcaggacaccctggcaggaagaaggcaagcagctggcaagcagtagcctcgtcactggtatgaggagacgtgtgctgcaaacaagcatggcaggacagcagcgggagctggtactgtccccactccagaccgcagccctgcagcccgagacgagtgggagccggtactgcccccactccagaccgcagccctgcagcccgagacgagtgggagccagtactgcccccactccagaccgcagccctgcagcccgagacgagtgggagccgggactgtccccactccagactgcagccctgcagcccaagatgctgcctggaggcaggaggcctcccttccaagacctgggtgtccggctttctcaagttaacaaggagagaggagtgccgggcagctctgcctgcctcccctataaacagggatcaaaaagaaagaaaaggctgggcacagtggctcacgcctgtaatcccagcactttgagacgcagaggcaggcagatcacgaggtcaggagatcgagaccatcctggctaatgcggtgaaaccccatctctactaaaaatacaaaaaaattagccgggcgcggtggcgggcgcctgtagtcccggctgctcaggaggctgaggcaggagaatggcgtgaacccgggaggcggagcttgcagtgagccgagatcgcgccactgcactccagcctgggcgacagagcaagaccccatctcaaaaaaaagaaaaaaaagaaagaaaagccagacatttgagcactgagtctcatgggaagttccaagactaaataaacaaaaaagaaccatgagagaaaatgcagaaagcaaaagattcgccttcctccaaacccactttatgcctaagagcagaactgaattctctggaacaagaagaggggagctcagggaatgatagagatgtcttggaaatgaaaaacaggactgctaaaatccaaaaccaattttttatttttatttattttaaaacagtctggctctgtcaccaggctggagtacagtggtgtgatttcggctcactgcaacctctgccacccgggttcaagccagtctcctgcctcagcctcctgagtagctgggattacaggtgcacaccaccacattcagctactttttgtatttttagtagagacggggtttcaccatgttggccaggctggtctggaactcctgacctcaagtgatctgcctgcctcggcctcccaaagtgcctgggactacaggtgtaagccactacatccagccccaaaactaattttttaaaaagcagagagagtgtgtgtgtttggattcaaggaaaatcttatctacaagcaaaggtagaaagaaggactcacagaatctatccaaaaggcccaacatctgactgacaggagttccagaatgagcaggaaacgagaagaaatgttatcaaagaaatgccaggtctcaaggcagaacgtgctcaccaagcgcccagcgtggtgaggaaacacccgcagttggtgtgaccccccagaggtgcagggatcagaggggaccctgcaggcttccagggagaaggccggcggcctggctagctctcaccaccaaggaccacgactggccttccagtcctgttggaaaatgccctcttccccgattctctccccagcctgatgtccagcaggtgtgaggtcagggtaagacgcttctagtcccgtgaggcctttttttttttttttttgagatggggtctcgctctgtcgcccaggctggagtgcgtgcagtggcacaatctcggctcacggcaaactctgcctcccagataccacacaaggacttctccgagccagctttctgagggttaactgagggctgaggggttcaagaaggaggacacgggcacagggactcacgggcagtgagaggcagtggggccaatggcgtgaggagcaccagagagcaggagggaacgggcctggggcgtgaatccggccccatgagtgctcttcggccgcccaaaaccggtcccatgggtaacagcgtggccttcggcaagtgactaaagggcttcctgcctcagcttccccacctgtaaacagaggataacaatggcatgtactggatctggcataaagtaaatgttcaatagatagctagaaaagaatgttttaaaacctcagagatacattaggcgaaaataaaagctgggctacagaatgacctcttccgtggggacgaggggcagaggacggcagcccacctccaggaggagcttaaagaggcggctcctggctgcagggacaggagatagaagtgggaaaggcttgggcgccatttttattgtttggtattttttgaatccacactgtgtgtgtattatcggttttacatcttaagaaaaataaccaggctgggtgcagtggctcacgtctgtaatcccaacactttcagaggctgaggcaagagatcgcttgaggccaggagtttgagaccagctgggcaacacagggagacccccccatctctgcaaaaaatttaaaaattagccgggcatggttgcataaatctgtagtcctagctacttgggaggctcagatgggaggattgcctgagcacagggattggaggccgcaatgagacatcattgtgccactgcactccagcctgggtgacagagcaaggccctttcccataaaaagaaagaaagaaaaaaaactcttggtgggtcagaggcagtgaggtcatcaggcggggcagcttcaggaccaggtggaaggggcccactgtgacctccctggctgcacccaggcctttgtgactgggagccagtgggtcacccagagccctcaataagagggcagcaggtcgggccaggccagagcctggacctggggtcaggaaggggttgcagggaaggatggaggggctgaaaaccctgggcccctgcggccacgcccaaccccagtgtcccccagccgcagcctccagcagccatggaggatgcctggactagcactgccagggatttgtagtgtgaccctgcctgggccccatctcctctgctcactcagtgcagtcccagagaccttacccagtcccaggggcagggggtagtggggaggggatccagggtggagggcgaggctgccaggatcttttctgtccagcgaggagcagagagcgagaaaccctgaagggctgagacaaggagacctggagtcagggctcgggtggggctggcccctgcacccagggtcgaaccagggggctcccaggcaggggggattcactggctccggggtcagaccctgcccatgcccacccctgtcatcagagggaggggccctggccttgcccaaggcagccctgtcccagcttcagtgtgggcctctgggctctgcagaacagtccttcctggagcaggagaaccacagcctggtgagcacccacccatcacctggcgcccctgccccagccccagccccagccccaggagcggccatgacaagcagtcccctctctctgctccccaccccagaaaagacagaaccaggaccttcgggagcagctgggggccctcctggggccggggcagcagttcctgcccctgtgtcccgaacactcaagctgcactgctctggcctgggtaagtacagggcccagggaccccatgcagccaatgccccactagcccacagccttggggctgatctgggggctctcccacagccccccgacccggctggcacgcagcccttggggaacagggcacctctgcagctgctgcggcgggagctgtcccaggggcaagaggctttcgtgcagccgtccctggtgggcctgggggaggggctgtggggggaggaagcttcgtacagcactccaggtgggcctgaggggttcattagggagggaggtcttcgtgcagtaggctagtgggcccggcggggaggtaccggccaccctgctgatgctgcccaagcccaccctgggccccaccctcaacgagctgcagcagatccgcctgtgctttgagaggaagaagatggtcatcacagaggtgcccgcctggctgagggggaggggtgctgggggccaccccgtgggtcctgctcctcaggcgtgaccccaccttctcccaggcgtgggacaacgtggctgagatgcacgtggccctgaacaaccaggccaccgggctcctggtaggtccccacaaggcagcacccagaaggatggggcccggcgggcaagaggccggggagggcagggccaggggcctcatgtgcttacctcctctggcccccagaacctcaagaaggacatctggggcgtgctggaccagatggaggacatccagctggagattctcaggtaacacaggggcaggggctgggccagctgagcagggtctcggaaggggttctggtcaggacaaggcagatacatccttgaccctccccacctacctccatagcactgagccgggggtgggtgccaggctggggggtggagggcgtggggtcttgacagtgaggcctctgcagggagcgggcccagtgccacactcaggccaagaaggagccgcagatggcgagcatggcagtgagccccccacgccccactctgggtctggagaccagccccccacccagcaccctgcttgggcaagggggagaaatgagctccagcagagcaggtccagggtggggggcatctgaaaagtggctgcaggagcctgtccaggaggaaggggccagggctgcggtgcggggagccctgtctgaggagggtttcccaaagccagggatccccgccctcagcctggaccctcggagtgggctcccctccccatcagaaagggagaccaaagttggaaagctccaagggcctggcaggccagctctggtaggtgactgtgtggcagagcccagcccccaggccccctgcgtgcccctggccctgactgccaccgcccgtaggctgctgatcctgaggctgctgctgggcaccctgctggtcgcctacgtgtacatggtgaaccccaggcccttcgaggggctggtgccgcccctgctgagccgtgccaccatctggaagctccgggccctgctggaccccttcctgcgccttgaggtggatggcttcctgtccttctaggccggaggcccagcggccccagcaaggaggtggccaggcgaccagcgctgccccagatgcccagtggctgcgctggccccctgcacacggcaccactgtgcaccgtccctgccaggagctgcagagaaggggggtggcggggtctgtcctgagggttgggcctgtggttggacatagaatcatgacatatgtagccggtgagcacgtctctgtggaaattggggaagggacgccggggcgatccggcagcgagggtccctcagggtggagaccccagctcagggccggcttcccaccccacatcccacctgccctccagaaggcagcccctctgcacggggctctgacccaaggcgtcttaggagggtctccactgaaaggcaacagcagtaaggactggggagtcctcaggtcttgccccctgggccaggccctcccagggacctcagaggtcaggttttcagcactgaacctgctgatccactgacctcatgcccctcatgcaactcccctcccttcctggccaccaccctccctgcccaggtcctgtcacctccccaacccagggccctgtccggtccagggggccacactggtagacagaactgtggagatcaacaccaaaaattctatctggggaattaattagcagggatacccttaagaacaatagagaatggttttgtggctttctcatcccaaaatgggagaaatagagccgcagcccaaggtaaaccagggacagggaccctgtgctgaagggctggccgggatgccacgctgccataggctgtaccactgctggaggacacaggacttgggccttgggccctctgagctcccagcggcatcatctttgggagcaggcaaccccagcggggcccaggcagagctggccatgaccacaggaccttggtggcaggcaggggccaatggctcaccaggctagcggctccaggaagttaagtcatctgttcatgtgtcaggggaagggaaggaggagtgcagaaacctttgggggcaacctgagacccccccacccagcccactccacggaggcctgggctcccagaggaggaagtggcttagtctaaagaggttggttgggcagggaggccgggcaaaggttgtgctggtccccacagctctggggctgccccctgtggggtgctggaccccctgcagcaggtgggggactccttgaggtcacgtggacacagggtctcaggcgctggcaggctgggagtctgtcaagctgtggctggtgaagagagcccagcccacccccagccctgccccagggtccatggcagtctgacctcctgggtccccagctgggctgtcccagacccgcctacttgtcatcctgctagggcccggaaaggctggggaaaagactggaggcagccaagggcaggcagcacatggccccgcatgggggtgccctggcgaccaggctccagggggcccgcagtggtgggtggtcctctgggtggccaaggtggcacaggagcagcccaggaggcacccaaggctggccacactgcccccatccacaggtgcaggtgccaatccaccccctgtgggctgtggcatccgtgagagagaagcagaaagttggtcaacacggcaccagcttcagggccctagagctcacacccttcccgcactgagatagcctcagcccaggatgtctcagccccgaacagctgtgcacccctcacactccctcagcgctgcccctggcatttggcaggcaggagagttccagcaggttcagcagcccctacagggccctgtgccagcaggtggcccctatgcacccctatttcatctccccaagctcttgggttcctgggattcccctgtgggtagtggcagacccaagtctttcccccaaacaccctgtcactgccagaactgatgcagacccaaggcgagagaccctcacacttcccagccacagaccatcggccaccccctcctcccaagcctctgactcagcccaagtccacagaaatgcccccaaggaacccaccgatccctgcacaccagacagcagccaccccctcttctgaggcctggcccctgccctcccctaactctgggggttctgcagcaacagccctggccttgcctgaggaaagaatcaaaataacttttttaaaataaaattatagatatatagatgtagatataaaaacataaaacagaaacaacgcaagcggacgctgttgtgtgcttactctcaggtccctgacaccaagggaagcactgacccctccccagtgtgctttgccacggcgtgagcaccgcagccaggccggggctggggacgtggcatgccttggggcagggttctccagtttggcagggagggcctgagggctggggaggaggctctgggtgtcacaggccccgtggcagcatcacccccgtgcctgctcccgcctgccccgttgcctcccataagagcataaaaaaaggttcaggctttggtgaaagggacggcggcggccggaacactgacacatggctggccatctgtccacccatccaccactacccagagcagatcagagcagaagcatcattggccttgccaagctacgagcttccagcggggtccatgaaaggcaacgtgttaggagtagcctggctggggacactcggtctgggaacccacaggctgtgtcggaaggacggcgggggccctgggtgcctctgtcgatctctgggacccatccgtaaggggaccgttgggggctggcctggcaatgacctggggtgcatgggtgatgggagtgagccaagcctggctgagagagcgtgccccaaagagactgactgggccccctcactgccccagccatgggatgggcccagacacagaccagcccagtggcccttggcccagtgagccaacttccccatgggcagatgagtggacgggcagatgagtggacaggcaggcagagcgcttgcggcaagctgtggaggcgtggcactctctcccgccgatgggtccacaccaggctggggtggccttgggtccctggggcagagaagttgatggggaacgggggtgtgctgcggggtcctggtccccgtggcaccacggcggatgggtggtggtcagtcctcacaccaggatctcgtacatggtcccacccacgccagacaccttcttaaccagcgtgtgccacatagatctggcagagggccctggggggcctgtggcaggtcccagccgggccaggcccagagactgcccattaagcttacctgggggagtcttcagctgagggtggtccctgcatcaaaacaagcacatacacgcatgcacacggtgaacacacgaacacggggacagaggacggaggaggcaacaggacagagacgacacagacgtggactggtgtagccatgtcgtggggccctgggcagtccctgccctctaggctcggagggttcacccagaaagtaggagggagatgcagagcctgcctggggagcggctgtgccatcacaggacagatgttgtcagaactgccaccaccctcccaagtccctgggtccctaggcagcactggccacagagagcatggggcagtcaggtgggcactgaatggagcccctgccctgctctgcactgggagcccggccactctgcctggcctcattcctgctctctctcaggaaaacgaggggctgccctcctgcccaccagcgctgaccaacagcagctctatccttgctgcttaaaccttctcaaggtgagagccctttgtccccgggctgcgatccctgcctggctgcaatgctgcccacttctaggtctcgggctccccactcatcactcccagtggcagcctcctccccaactccacaaaagctgaacagactcctaccctgtggggtaggggaggcctcctcagggctggactgctgtgccctcagcccctttgtggccaagtggcctgggctgggctgggcggggctgggctctccccctggggccgcatctgacgacaggaaacagctgagcctgtgcttgaggtttccaggcccagacggggtgacagacgacagatgccgtgaggacaccatgcgtccgtggcgtgggtcctggccccagcaggtgtgcagctctcctacctgggcctgggcctacaagccagctgaccccgctctctcagttaccaacctgctgggtgcctggagccagcctgctttctccagtcctcagtttccccactacgagcagggaagcccctgcttcccagaactatgtcccacagggagggccagggcccggccacccagggaggcacattctgctgcgaggtaatgtcctcagccccagcctcctagagatgcagcaaagcaggcccagggagagcaccgggtagacagggccactgtgacccaggatgccagagccacagcctaaaggaggcccaggctgccacatgatactgaccccaaagagaaagccccatggcctcctacgtgctgggtctgtgccagctctggaagaacaagtcattgggatcaggacacaaattctcataccctgtccccagagcatgcccaggacatcctcagagctgggccacacgggctagccaaagccttcaatgcagggtgaggcgcatcctccctgtcccgtccccagagaaaaactcaggcccctgggatgacctatgagtgcccagccaagaggggccctgcagacggctggacagctgccctgtgccaggaagcccacccgcacctcccagcacccacctctgcacggtcagcgagggcggtggctctaggaggtccatttggatgaaggtgacacctttggggcctgtgtaggatggtgagtggggagtgccgggcggggagggcaggccctggcgtgcgggcgacctgtgtgagccactactgggccggggccccggggcgttgctgctgacctgatcagcctgcagggaggaggacgacgtccgcagtgcacggctcacggagctggaaagcgaggacaatgatgtctgcaggacagggttgcaggcgccgccgaagccgggcctggccacaaggtcatctgtagagctgtagcacagcgtaggacctcggaagccctcagacagcacactggcctgctgcaggctgtaggagctgggagcatcatagacgcctgagtcgccgaagagtgagtcggcctgggagcgcagcaggcactcacgctcctccctgtccttgcgctcctggatggatgccatgatggtcctggacaggatgtcgtagagcacaggcgagggctcctggggccgggggcccagcacgggactgaagctgtggggcaggggccatggtgggtcgcccgttgccccagggtgcaggtagggtgagtggtatccggccacgccaactgctggatgggcgaggcaggcgtggccaccaggcgagccagggttgagcacattattgtaggacaggctgcgattgtggttgggcagtgcatgggggggcaaagatgctacggtggggcatgggaggcccaccctcggagcacaggggctgcagggccacgtagtccccgccctgccggcttgaggccttgaggctcagggagcacaaagcaatgagaaggcatcagaggcgctgagcggtggggatggcaggtaggctgcgtgcaggcccccgggcccatagtcagggaagtccaggctcggctcgacacaaagtccaggctatggatgctgtcgtcccccaggataagggaatcggggcctggaacctgtagggagaaggcattctcaccactgcccacctgctaccctgcctgcagctgccagtcagcacccacggggtccacacctggcaccgcggcctcaggaactgggcctcaaggagccgttaagagccacatagtgacccatggccctgtccctgagcatccatggctgaggggcaggggctctgcagcgggagggaggccacagctggctactgcagacacccagggctcagccttttgagctacgcagtcccaggggcctaccactcagggcaaccacagggaggaggggcctcgtctagcctctttgatgggcacgtgggcatgggcttgggcttgggctagggacaagagcctcaggaaccacaaagccagaaggcgatcagggccaatgtaggctcaatgcacttggccaaccagacccaatcccccactggacccaggagtcccaggaagatgacatacccggagccctcatctccaagcagggctaccgcctcctgagaggcatggcccctgcatgcctgcagactcagacccttgacaaggagcctagactcactgctccaccatgtgactctctccaggaaggacatcaatcctgaggggagaggtccccagggatggggctggtctgggtgcacgggcccagccacaggcctgcctctccgggtggcccagaaggagggacggcgccctggggctgttcagcattcctgatcactgcaaagaccgccctgcgctgctcaccattccagtgaccacagagcactcatgcaactcagggaagaaaaatgtgctttctccagcaggtctcaaattcttccaaagtcttcccataggccttacagagtgactaatggtggaattccacgcatcctggtacccagtgctcctggagccagccgcccacctggcctaggacaacgctggccaagggacagatgccaagcctggacgtcccgtgccagccccttccaggacaccctgctcctctccgtgggtcccagctctgggtgcacacaggcagggtcctaccagtcacacaaggcccttggtgacccaggcagagccctgaggggtgtggcctcaggggatgtggcctctgctggagaggcagggctcagggggggcccttcacggggtgaaagctgtggggagagctcctggaggcaggcctggggggacagggcttgggcgtgcagggggcagggggcaaggcgggggaggagtggggggcaggccacgcctctttacctgctcgcctcatccacagaaggtgccttaggacccgtgagccggcctaaacttgtacatggcaggcgtcggggggtggcggaggctggtcctctgcaccgacagggcactctctggggatgtagaccactgtcagactgaggtcagatgggggtcaacccatgtccctccccaggtgtggctgccccgacctcaccaacactgcctgggcgtggggtctgcaggtcactgctgaacgtgccagcctccatcttgggggggcagcgccggccccaagtccagcggcttatctagcgggtccaggctgcccttggactgggagggggcggggtcagtggtgtgtggggcttggatgatgggcaaggcttcgctagggattcgacctggaagctagtcctctccccagaatctgtctacggctccacctaccccatccacctcttttaggccccccctaacttgcctgtttccccatccaagggcctgactgccagcttaggcccgcaccgcagacactcacctccagcagacgccctcttcatcgcaggggtggggcggggcgcgtcgaggaccgaaagtcgctttggggccggcgcccgtctccccgcagccaggtccacatccaggcgccgccgctccggccgggcctggccgcgggacaacgctaggcgtgcagggcgagggcggcgcgggcctccgggaggatgaatgtcttatggaatcaggtggtttgacactcgaggaatccgcccagttcccctgggccggccagggcgggccgggggcggacccgggctgggcctcgcggtgggcggggcgctcacctgggcgccggcgcgggcgcgggcccgggctggggctggggagcacgggccggcgggagcgcgggcgcgaggggggcggaggggggttcttgggcggcgcagcgggccggggcgcgctgcaggccaggcagcaggaggcgctcagccagcgcagtgcacccgcgccgcgcgggcccagacaaaggtggtgtattcctaaagaggcggcggcccctgcaggaggccgaggggatggcggcccgggccgcagtgggccaggccccaggcctgagagtgtggcggcctaagctggcccgctccccaagcgggcaagggctttgtccggaggcctgggcatggcctctgcctacccactcccttcctggcctcacgaaacccatgaacccctccccgccggccccctgcacagaagcccttgctggagcacggtcgcccccatttttcagtaagaaacaggctctgcactgtttcttaggcttaagagagttctgggggccctcctgggcctttgtggccctctctgcaccaccctagggacgggatccaggcctgatgttacccgtaacccttcaggggtctcccacctcttcccgcctgcggaatggggactccaaacccagaagacgctctcggaggccacctccttagtatcccccactctaccaagccagctctcatggggcaggggggaggggggacgggcatggggccaaagaacccagtgacacccctgcacacaggggtgcaggtgtcccttctctgctttctgctcggggcacccaccgggcctcactgatgtgctcctaagtgtatcccggggtcttgagacaactgccaggctgcccctgcacctggagaagtgctgggagtcagctcagccgggctgggtcctccccaggcccaccctgcatgagaggaccatgcagatgagggtcttgcaggcccacctggtgtcagtctgtaggaccctgactcagggatggagtgggccagcctgaggccttgatggccctccttagagcccaggtccactgacatgaagcagagagacctggtgactgggcagccctgtgctctctgcctgcccctggccatggaggtggccctgagggacatgagcagggtgcaaggctggtggcctgcctgctttgtccagaggaagtgaggacctaccagagccctggtgctcccatctcagcccagtggcaggcagtttcgcgggacggagacatactggatgggccgggccctctgcctggtgtggaggctgcactgtccacacacctctggttgccactctgtagccctcatcaccttggcctgctttatccctatcacccttgtcccagcctaggcttaccagggcattgtggagtgcatgccattcccagtcgcacagaaggtgaggtggggcccagacaccccccagccactctgccccctggcctcctgaaggggtgggctgtgcacacactgccacctccccagggggtactggctgccaagtgccaccatctcagcccttgcggtggctcaacgggtcctcccagagccacatcaagacgtcgtcatccattgcacagatggagaacctcaggcgaagctcacatagccagtgggaggctgaggcctgacccccaaacaagcattcttcctccagggtccctgcacacagcagccttcagactaggaactgagctcttgccacagggatgtatcagaccctagatgagtcatgtggcactggccatcagtctgaggacagcactggggtggaccaggctccagtcttgggctgctctgtgcttgcagagaggccttgagacacttctgtgcttactgtgcaggcgtcacttccattatcagtgacccagagcggcccactacagctgaagattgtgaccccaccccctctctcataggtttaatgcccctcccacccctcctggagcagccgaagtgaccattctggggcatgggatgggcatgggaggaaatggggagccagggctgccctggagacttctggtatcagaaccctctccagccaccaagcccagctgtccccagttgctctgggttggggcctgggcctccacttccccacaggtctgtgcagtgggagcaaggcagaggcccgcagagggacaggctggtttcctgtgtctgccagcttggtcagcaccttggccagcgccctccccgctggaagctgggcccactcctcggtactggctggctgattaggtgtgggccagcgctgacagggagttatgggggtgcagaggcaggacaggccatctgtgcccagctgatctgagtgcccaggttttctggacacgtgaccctggggatcaggaatgagctggagactggagacagctgtgccctcagggctggacagacctgtcacaccctgcctgggctaggtcagcagggccacacaggcatctgcctcagttgctccccacctcacacccaccctgtagggcacatcctctgccagtttgctcagcccaccaaccccctccaatgaggccagaggctgcctcacctccaatacccacccccaacctggggctcggctgagcaggggtcaagaagggcgagcacgcatttcgaacttgccctggttttgagctgagggaagcagaggatgcaggagttgcccactccagaggccctgggtgtgcgtgaggagccctgaggctgggctgagccgcttgtgggagacactgtgccccctccatctgagatcggggcctgggtgcccgggacactacagaccttttggggaacctgggagtcgggaagtctagagatgggacccacaggctggagtctgggctttcatccacactccccccgcccgacactcccccagccaccgcctgcacatcaggggagacaacatgcccccacgcccacctctgtccccagcagggctgttcctcccctcatctgctcggatcagtgttttctttaactgagccccatggtggcgaagggagagctccagcggaccaggcagcagagaggggaggggagaagccctcaaacaggccatgcgctctccacagagccgcatacagcaggagggggctgggcagccggctcagagcccattctctcctgggtactcttctggaatggcccccggccccactctgttccaaacatgggaccgtccagcctgggcaacaagagtgaaactccatctcaaaaaaaaaaaaaaaaagtaggaattaactaaggaggtgaaagacttgtacaatgaaaagtacaaaacattagtgagaaaaattagacataaataaatggaaacatattccatgctcatggattggaagactttatattgttaagatatcaataatacccaaaacaatctataaatgtaatgcaatctctaccaaaataccattacttttttgcagaaatagaaaaacctatcctaaattcatatgaaatatcaaagggccccgaatagctaaagcaatcttgaaaaagaagaacagagctggataagtcacattttctgatttcaaaacttactacaaagctacagtaatctaaacagtgtggtactgacataaagatagacatacagactgatagaatagagagcccagatgtatagtcaaatgatttctgatgagggtgccaagaccatttaatggtgaaagaacaatcttttcgacaactggtgctgggaaaactgaacatccacacacaaaagaatgaagctggatctttacctaatagcatatataaaaattaactcaaaatggaacaaagacataaatgtaagactaaaacaataaaactcctagaggaaaacatagaggaaaagcttcatgacactggatttggcaatgatttcttgcatatgacaccaaaagcactaatagcaaaataaaaagacaaattagacttcatgaaaattaaatttttatgtgcatcaaaatacactatcaacagagtaaaaagaccacacacagaatggaagaaaatattttaaaatcatatacctgataaaggattaataaacaggatatatagagaactactaaaactcaacaacaaaaaaaccaccaacccaatttaaaaaatgagcaaagcagccaggcactgtggctcacatctataatcccagtactttgggaggccgaggagggtgggtcacttgaggtcaggagttcaagaccagcctggccaccatggcaaaaccccgtctctacaaaaaacacaaaaattagcatggcatggtggtgcatgactgtagtcccagctactcggaaggctgaggcacgagaatcacttgaacccaggaggcggaggctgaagtgagccgagatcacagcactgccctccagcctgggtgacacagtgagactctgtccaccccctccaaaaaaaaaaaaaaaaagagcaaaggacttaactagacatttttctaaaggtatacaaatggccagcaagcacttgaaaggatgctcaacatcatgaatcattagggaaatgcaaagcaaaactgcaatgagacaccaccccacacccattaggatgaataccattaaaaaaaaacaacagaaattacaagcgttggtgaggatgtggagaagtcagaacccttcttcattgttggtggggctgtatgatggtacagcagctgtggaaaacagtatgatggttcctcacaatattaaaaattgaattgctgtatgcttcagcaactccacttctgggtatatacctgtgaacccaaaatatctgagacaggtctcagtttattaatagaaagttcattttgccaagtttaaggacacacctgtgacacagcttcaggtggtcctgatgacatgtgcccaaggtggttggggctcagctcgcttttatacattttagggagacatgagacatcaatcaatatgtgtaagatgtacattggttcagtctggaaaggtggaacaacttgaagaggcagggtcttccaggtcataggtagataagagacaaacggttgtattcttctgagtcttttatcaaccttttactgaatacacaatttggtctggctcagtgaatttgcatttttgcataaacaataggcagagagaggaagcaatccaatatgcatctgtctcaggtgagcagagggatgactttctgtcctacatatttgaagatcatctatcagtttatattgccagggtgaaattcaacagaactgttttagggtaaagatcttgaggcccacgaggaattcccttgtaggcaaattgtgagggaggtatgtagctgttttgttttgtttgagatggagtttcactctttttgcccaggttggagtgcaatggcgcgatctcagctcactgcaacctccgcctcccaggttcaagtgattctcctgcctcagtctcccgagtagctggaatgacaggtgcatgccatcatgcccggctaattttgtatttttagtagagacgaggtttcatcatgttagccacgctggtcttgaactcctgacctcaggcgatctgcccaccccagcctcccaaagtgctgggattataggcgtgagccaccacgcccagccgctgtttttaatctttgtagctatcttatttaggaataaaatgggaggcaggtttgcctgacatagttcccagcttgacttttcctttggcttagtgatttttgggtccttagatttattttcctttcacatacccaaaagaattgaaagcaggttctcaaagagatatctgtacatccatcttcatagcagcattactcacaatagctaaaatatggaaacaagccaagtgttcatccacagatgaaaggatacacaaaatgtggtctatgtatacaatggactgttattcagccttagaaaggcaggaaattctaacacatgctgctacatggacgaaccttaaggacattatgctgagtgaaagccacagtatgattccactcaaatgagatacgctgaggagtctcaatcattgacagaaagtagaatggtggttgccagggcctggggtgagatgggaatggggaatactgttcagtaggcacaaagtttctgtttcacaagatgaaaaggattccagagctagacagcggtgatggctgaggtagaaggatcacttgagtctgagaggttgaggctgcaatgagctatgatcaagctacagcactacagcctgggtgacagagcaaaattctgccaaaaaaaaaaaaaaaccttaacatcacttggccaaccttattcaagagcccagtgtgtctgggccccttcagagttaaatttccgtgaagtcaacatacagcacctttcaccgtggtcactggaggttccctcttcatttctcctacactctttgctctcccaccagatcgtcccagaactcctctctctctcgccactgatgaactgttgtgggaaaaacctaatggccactttccactgcccatcttcctggacatcctggcagcagtccgggtgaggggctcacctgcgattctgaggaccctctcctctctggatcctgacatcagaacgtgctcctccctctctggatgctcctccccagcagcttttgccagcagagactcctctgcctcagtttacaatctccagtgcaacacagttcagttatggccttattattctatctctacacttaaaaacataacctctgggtgatgcaatccatttccaaggcattaattattatctccatgcttataagcccaaggttttatcttcattcagaattacatagatatagaattgctctgttgattttctggcttggttgtttcacagacattacatattaaaaacaatccaacccccaaatcttcttcttcttctatttggctgtgacccagactgtcaataaattgcaccagtgtttttttttaaattcctttagagacagggtctccctctgtcacccaggctggagtacagtggcatgatcatagctcactgcagcttcaacctcctgggctcaagcaatcctcccagcttggcctcccaaagtgctgggattacaggcatgagccactgcccccggcctgtgcccgtgtatgttaatttgtgtattagtctaggactctgggaaagtttcctcatcctgtatgtccctatgtcctaaacaacctgtggcccagtcctgttcattcctcctctaatatggatctccaaacgctcctctttatttccacacccactcccagcccttaacctcttggcccttgaaaggcctctgaggagctgttcttaggttttggctttgaggaacaagcctgctaaggtcactcgtgtccagaattttgtgtgaacataagtgttgtcgggtgaggtcctccagacatccttgagttggacgactccctaaaaggactcgaagaacttcatgaagcccaactccctgaaggacaccacctggcccagggccccaccatagatcaggccgtcagcataaactgcccacagccccagctacgaaaagacactcttatcaggcgagtatttcagtggtttctgggcttcctccctggagccaggcaaggccagacattctcttggaatgagcaggttctgagcatcccagaccaactgcattaattctctgccacaccgtacatgtttatttctctggggcaaatgcccagggactgagttgccaggttgttccgtagtggcatgttttgctgttggtggtggtatttgctgtattgggagggggaattgccacactcttttccagggtggctgtaccacgttacatttacccagcaatgtgtgagttgcccagtttctccccatcctcaccagcttgtggtgctgtttctacactgtatttaaggcatgttgatggatgtgtcatgctgcctcaccatgatcttcatgtgtattagtctgcttcggctgccgtaacaaaataccacaggctgggcgacttcagcaccttaaaccgttttctcaccattctacaggttggaagtcccagatcaaggtgtggcagcatcagttcctggcaagggcccttcctggtttatagatggcccctgtcactctgtcctcatgtggactttccttggtgtgtgtaggtggagagaatgggagccaactccctggggtctcctctaacaaggacacaaatcctgtcttatcaggatcccaatttatgacctcattcaaccttatttcttactccaaattcagccacacggggttagggcttctacgcatgaatctgggggatatatacattcggttcataacaataccttgccaggaaatggcgaacatcttttcatgtgcttacttgacatctgtatatactcttggtgaaatgcctattagtgtcttttgtctattttgtatttgggttttcaaaaaatgctgttgcattttgagagttcttggcacattctggatactagcacttggttggacctgaaatttgcaaatgcaagcagacttcatcttattatgctttgctttattgtactttgctgtacaaattgaaggtcgtggcaatcctgcatcaaggaaacctacaggagccatcatcccaacagcatgtgctcactttgggtctctgtgtcaaaattttggtaattctcacaacatttcaaactttttcattattatgatatgtattgtgataatctgtgatctttgacgtcactattgtcattgtcattgttctggggcaccatgaactgcactcatataagactgtgaactaattgataaatattgtgtgtgctctgaaagctccaccaaccagctgttccctcaggtctctctctctccttgggcctccctattctctgacacacaatattgaaaccaggccaatcaataaccctacagtggcctctaagtgttcaagtgaaaggaagagttgtgcatccctcacttcaaatccaaaactagaaataattaagcttagccagcaaggtatgttgaaagcttagataggccaaaatctaggccttttgcactaaacagctagccaagtcatgaatgcaaaggaaaagttcttgaaggaaatgaaaagtcctactccagtgaacacacaaatggtaacaaagtgaaacagcttatttctgatatgcaaaaagttttgttttagtggtctggttagaagatcaaaccagccacaacattccctgaagacaaagcctaatccagaacaaagcattaactatcttcaattctatgaaggctgagagaggtgaggaagctacagaactgtttgaagctagcagaggaggttggctcatgagatgaaggaaggaagccatctccctaacagaaaaatgcaagatgaagcagcaagtgctgaggtagaagctgcagtaattacccaaaagatctagctgagttcactgatgaaggtggtgacactgaacaacagattttcaatgtagacaaaacagccttttattggaggaagatgcaatctaggactttcctagctagagaaggaaagtcaatgcctggcttcaaagcttcaaaggacaggctgattctcttgttaggggtgaatgcagctggtaactttaaatggaagccaattcttatccatcattcccaaaactctagggcccttaagaattgtgccagatccactctgcctgtgctctataaataatcaacaaagcctggatgacagcatatctgtttacagcatggtttactgtaagccctctctgagacccactgctcagagaaaaggatacctttcaaaagattactgctcactgacaatgcacctggtcacccaagagctctgctggagatgtacaaggagacaagtgttgttttcatacctgctaacacaacatccattctgcagcctgtggaacaaagactttcaagccttgttatttaaaaaatacatttcataatgctgtagctgcaatacatggtgattcctctgatggatctgggcaaagtaaattgaaaaccttctcaaaatgattcaccattctagatgccattaagaacatctgtgatcaaataggatgaggtcaaactagccacattaacaggcatttggaagaagtggattccaaccctcatggatgactttgaggggttcgggacttagtggagaaagtcactgcagatgtgggggaaatagcaagagaattagaattagaagtggagcctggagatggaattgaattgctgtgatttcatgatcaaacttgaacagatgaggagttgcttcttaggggtgagcaaagaaagtggtttcctgagatagaatctactcctggggaagatgctgtgaacattgttgaaatgacaacagaggatttagaatagtgcatacacttagttaataaagccgcaccaggatctgagagtactgacttcaattttgaaaggagttctcctgtaggtaaaatgctatcaaacagcattacaaagctacagatcaatcttttgtgagagtcaatcgatgtggcaaacttcattattgtcttattttgagaaactgccacagcaaccccccccacaacaacccttcagcaaccgccatcctcatcagccagcagccaatcagcttcacggcatgactccaccagcaaaaagatcaaaaagattatgtaggggtctctaaaggctcagataatccttagcattttttagcaaagttttttctgtatcacaagtcattaagcaaaccaatattcttgttttttttttttttttctttttttgagacaggatcttgtgctgtcactcaagctggagtgcagcggcacaaacatggttcactgcagcgtcgacgtctcaggctcaagcgatcctcccatcttatcttccctagtagctgggtctatggacatgtaccaccacacccagctaattttatttctttttgtggaccacattgccaaggcgggtctcgaactcctgagctcaagacatccacctgccctggcctccctaagtgctggcattacaggcatgagccacaacaccccgcccaagagagtatttttaaattaaggaatgtgcatggtttttagacataatgctattgcacacttaatagattacactgtagtgtaaacataacatgtatatgcactgggaaacaaaaacattgtgtaactgagtttacttccatatttgctttgattgtgggagtctggaactgaacccgcaatatctcccaggaatgcctgtcttttctcctggtctgtactttttcatttcatcctcttaagctaagtgtttcatggagcctaggttttaaatgttgatgaattctgatgtatccatatttgtatgggtcatgcttttggtgtcaagtctcaaatctctacctagttgtagggctccattttttctcttggaatttctcccctaaagttttatagttttatgtttaacatgcaagtgacccattttcagttaatgtttgtatgagcgaggtgaagtgcatttcattgaacagtttgtcatcaacatttaccttattttaaaaaacccacaaattcatggtatttcattgtttggatgcactgggacttattgaactaggcccctctcaatgcctatggtttcttcttccttttttgttattatagtaagtaatgcaacatccattttgttgttttgtgtgtgtgtttttgtggagatggagtctcagtatgttgcctaaaactcctggcctcaagcgatccttctgcctcctcctaaagcactagggttacaggtgggagccaccacacttgcctgagaacgatattctcatcacaaatatatttgcacaaatgcgcccccacacctgtttgttgtcattcgactcggtcatgcagtaggcaaagataaattgtttgaactttatgtggtcaggctatttctttgatggcttctgggctttgttttatgatttagaaagacctgcattctttggagtggaggaattaaatggaattaaaagtgtcacatccatgtttctgcaacgccttttgtggtctgttttccagatctaccaccgctcggagccctggagctgctggcgcagcccaaggaggtcctggaggggcaccccggcctccgcgcccctgggaaaggtccccacccctctggagcttgggccctgctggtacagaccgggagtcccgaggggagtcggtccccttcctggcagccgtccctggtgaggaacggaagtcgcagggactgcatgtaaaaatgtcccaagtaccccttctcctgctgggttgcaccgtgcctggcggtggccgctgggaactccaaggctgacacccgctatgggtgctggacgccctccgtcgccccgggccgagaacaccacctgaggtggatctcttgttctcgtagctgggaccacaggcgaagccaccgcgccggcctctgcacccatttcttgtgcagtcctctgaccccgtgaggtggtcagggaggatggcccgggcctcctggtcctggttagcacagcagggcactgccaggctggctcactgtccatggcaggagggtgcaagatgcaaggcggcagacgggtggcccgtaggtgggagggggaaggcccgtgggcagggactggtctgtgtagcccggctggctgtgctccacctgctccagccacagcctggagcacctgggcccaggttcctccccaacgcaggcagcctcgccaaggcctctgtggacgtgccctccccactgaacgcacaaggtatcctctgctctcccaagtgaagcggggtcaggccaggataggaggtggacggaagagcgcttggaaatacggggccctgtaggcatcttactgctcttgacagccagaccctctctctcctcttgcagtaggactcggcccagcactctccaaatgcagccagcccctccgccccagcccagcaccatccctcccactcccccggactgtatgcaaacacactggcacacagcagcttcggcctcttcagccagctgacccagagaagacccgtccacagcactgacccacacctcactactccctgacaccgtcccagaccacaccctcctccaacccagtcactcacttggtgagcaaagatggcctgctttgccccaggtcctgctcaaaacgcttaggaatccatcagagaacaaaacaaacagggtttctgacttcatgaagcttccatttttgtggaagaagacggacaacagaagctgtatttattaaacacttacataacatagcactgactccatggcaggtgttatgctacgcattttataaatacaaattcatttgatcctcatgaaaattctgagttaggtattgttcatataaataaggaaaccaaggcaaaggggttaaacaatccacccaaagccacacgagtagcaagtggtgaagccacaactcaaccccaggcagcctggctccagagcccaggccctccacctctcagtaagcatgagtgagcaacacagcatgctagagggtgagtgccccggaaaaatggagagtaaagcagagtaaagggaatccggagcacggagggaaggagacacactgacattttaaactgggaggcatgaggattcccagaggagctgacatctgagcaaaggcatgcaatgcaagggttgagggagtctgcatgcaatattgcaggaaagagtgtttcagggagggggagtctgtcccacagtcctgaggcagggtgtgcctggagcatgggaggaaggtccggccagggaggggacagcccctgccttttgtgcagcagaatgcccgagcgtgctgcgtgcccaattccctgcctccctggtgggccgtgctgctctttcagtactcaccttgacttccaaagtgaacagtgaacttagagaacagagcccatgacctctactccctctgcttgtccctggtactttcaagctgatgtttgctggatctgtctgccttgccttgtggattccacaaaactacaaggtccaggaggatgagcaggtcctgccagggaagcttctgacacctctgtcactggtcctcctacactagtggtgagcagtagcctctgcctggggcggggaagcagcagtaagtaaagggcacttgtattctgtattttcaaagcatgcctgcccaattctatattcaaattttattcccagtaggaccctttaaactggcaggcagccaattccaccctacttgacaaatggcaaaaccacccacctcggcctctcaaagtgctgggattacaggcgtgagcaccgtgcccagcctcaagaatgactctcaagaggtgagtaaagaccgggctgggcgtggtggctcatgcctgtaatcccagcactttgagaggccaaggtaggcagatcacctgaggtcaggagttcaagaccagcctggccaagatggtgaaattctgtctctactaaaaatacaaaaattagccagacatggtggcacacgcctgtagtcccagctactggggaggctaaggcaagagaattgcttgaacctgggaggcagaggttgcagtgagacaagatggtgccactgcactcaaacctgggcaacagagcgagactctgtctcaaaaaaaaaaaaaaagaaagaaagaaaagaaaaagaaaaaagaaaaaaaaaaggtaagtaatgaccgaacagtacagggtcccaatcccatctaagtaggcttaaggcaaagactgagcatttacttaagtcacagagaatttagctaaacgcagtgagtcacccacttcacacagagaaaaatgcatccctctactcctgtctcatcacacgcagaatgcccagatttctttcccatagttccccttgaactatgcaggctactcataaggaattaagaaatatgcatcagacacttccctatttctagtttcagtcttcaaagtagccaaaagaaaatgcctttttgtcctacatcagaaatggtaggacacctctttcctcccatttatttccaaagtagattacaccaatttaattccattttattttccagaataagcatacaaaaaaatccatcctggaagaaccattttcaactgggcgtggtggctcacatctgtaatttcaatgctttgggaggctgaggcaggagaatcattgagactaggagttcgaggccagcctgggcaacacagagagaccccatctctactaaaaataaaagaaaaattggccaggcataggggggcagccacggagtccaaacagctccgcagaatctaaaacatttaccttctggccttttacagaaaaaagtttgctgactcctccccagctgatcttgcttgactcagttctcccacctccacaagattaactgacctaaaactcgacttccaccgtccctctgtgttcaaacccccgacaggttccctgatgcccataaagcccacactgtaccctgacatccattcgaccaggagaataaacaagaaaagccctcaaggacatgcctttgctcatgctgttctctgcctgtcaggaagcccttcctgccttccaccgctaagcctgccgctgcttaccttgcccttgcagtcagggcaaggctctgggaatgctcccggctccctctgctctgctcccacagctccctatacttaccctcatcacagctcttaccacacagcactgaaatcatctatttgtgcgtctgtctcgccagctgcagcaagatcccagagggcaaggaacacatcttacttatctcccatcacccatacagaacccagtacaacagctcatcaacactgaacgcaaccccagcctggccaggctggcctccttgctgcccctgaatacatgctgctcacgctcaactctgagcctgcgctcaccccagcacccccacatctcacttaagacaatccgaccatggcctgggcacagttcaaattgcatttcctccctaggcccacagaagtcaatagggtcgcaggttcaaacccccagctcctctcacccatgtgccgagtgcccttgcacaagatgcttctgtctctgggttctcatcgtaaagagggaatgactcagtatcccctaacttgcagggctgacaacgcatataaagcttctgaaccgacacttggcatataatagatttttaagaacagcacacttgttttccccaatcacactgtctatgccatctgggtgtttcatcccttttcttccccgtaactgttgtgtatattaccctggctctcctgaggcaggtttgtcatgagcagagacacggtcgtagtatacttccatgaagccgcccctgccctaaaacccaggacaacacaacacgtggaggaagggaccaaaggatacaactttaataaataagttatttcaggttatttaggtttaaagaattgctaataaaaaaaaatgcaaagccccaggggatcaggagtgagctagagagcaggcttttgcagatgttttcatactgatgacaaaggcagttagagagcgggagcaagtgggttgaggaggggaccagcaagataggaaagaactcccccttggaggtggtactgttcattctcacccatccaaacactgcaaagaaacctgtgctgactcactggacagtctggacccagcatcctcccctgaagactgtctctggatgacaggaagccccaagcctcagaattccattccaagtttcatgagcactagtcagtgacagtaccagctgatgtgtggggtgctcactgggtgcttaccacatgcctgggaagattctaaatgcttacgaccatacaaggttaggaggactgttacgcccttcattgcacagatgaggaaactgagtctcgggggggataaggaacacactcccggtcacacactctagtaaccggtatagtacagcacagtctggttccagagtccaagctcttaaccacaacgcagtttgagtgtcttactctgatttagctccgccatttaccaggtgagagatctcaggcaagtcatctaacctcactgcgcctcatctttcaagtgggcctcatatgggtaactttctaagactgtcatgaggattgaaggcaatcatgccatgacacatattatgaagcggactcctgagaaatcagttccctcccacttttcccatatcccaatataagtgaggtttttagccaaaccccttgacctcttttactactaggaatgatctacatgccctgctggattttcctgcctactgcctatgcctaagcatttggacctcataaaaacttacaaaaatggcctggagacaagcaagaaaggaaagcaactgcacacagaactgagtggggcagcacaccagagatggcccagacggctcctggtgtgcagatgaatactgcatgagcagaggtcgggccagccaggccctgccaggacacgccacaactgacagtccgtgacagcacctagatccatgtactgcaccaacaggcccagatgacaggcctaggaggctgtaggcagagccaggagcacctgtgcctctgagcccgcatgagtataagtgctgtagggggacaaagaggggcaggcaggttaatgtgacaggcagtcattcccaccaatggtgggatatcagactgcctaaaatgttgtctatagcaaggtaactgtttaaattcctatagaaggaattctgttgcaaaattcctttactgtgaagaatttaatttcaagccaagaagtacagatacacactagtttatcttgaaggtaaatccacatttccatacatcaagtttgcttgaagggtaagagatacctttaagccatgaacccttcccctgggctggtggtcatgcacagagggaacctgtcactagcagcatgtaaaagtgtccttcggggccaggtgcagtggctcacacctgtaatcccagcactttgggaggttgaggtgggcagatcacaaggtcaggagttcgaggccagcctggccaacacagtgaaaccccgtctctactgaaaatacaaaaaattagccgggcatggtggtgcgtgcctgtagtcccaggtacttgggaggctgaggcagaagaattgcttgaacctggcaggtggaggttgcagtgagccgagatctagccactggactccagcctgggcgacagagcgagacaccgtctcaaaaaaaaaaaaaaaaaaagtgttcttcaagttagcaagtcagctccattaatatagcagggagcagaagccaggtgtttaactcatttctagaagatgtaagtaatttctatttgaatggacctgatcaaacggatccaaaggtcttagaaaataaaaggttaaaacccaagcaaaacggtatctcactcatcatatccagtagtaagaagtcctattaggccttttcccacaatacatcagcttccaaatacagcacatgacaaagaaatacttcaggaagatggaggaatggggggcttgctaccgtgctggctgatgacattattacaaggctccaaccagctccgaggccgtggtagacacagcaccgtggtcctacggttagaaaggagccccagaagcagcatggacaatctaatgcccaaatcatggatgaggcgcctccatgcacaggactgctcccatccaccgttgctagagcacctaggaaagggcacagactgcaaaaccctcctctaggaagggctgcccagtccaccgggggcagctgtatctctcgatgagtagctgggcaaggacaagcacattgagagcaccaggtccaaagtggtgacgggcccaagggcagcctgcaggcaagggaaatggtcccagcctttcctgcagccaaagtgcagggctggtcctcaggaaggagttgcaaaatgatcctgtttgcaaaacacaaacattccacaaacagcagacacagcgggtaggtaagttctagaaattctcagtcttaggtgcaagaaataaacaaaaccaaatcaagaagaatattttactagttagcataaatttgcttagcactcaatgtccagggcttcctggccagttaaatccaggttactgcacttgcatggctgacaatgcatccaacctcttagaaatatcaacctcttgcagacgcaggctgtcttaccgcgtggcactgatatacaacaggtgctcaataaatgtgctgaaaaaagtcagtgtgtaaaggattcctgaagtaggaatcccccctgctccctgagggtggttgaggctcaggggcttgtttgtgtccccaccctactacgctagggcctagcacggtgctcactacacctggagggcccattcaagctgccacctgtgaatttcttccctgcctcatactgtctttttctgccccactcctcttccttttgctccctgaacatgtaatctcatgggatttggagtcattagctatgcaaattattgggtttatggccctttacctcactggaacaacttccctgctgtaaaatggggtgaaaggaccctacctgaagactagaaatgatgtgtgcgcagtctggccacagtaaggggaagtgatcgctgttatgacttgcttatataattttccacaggccccactgtctaaaggaacttagaataccaaaagcagaaagtttatttgtttttcctacccctggcaagggtggttttgagaaagcctatctgttttggaaagaaactgacccaagcccatgtcactagttaaaatatttcctttttcctttttctcagggaaatggatgactgactagtcatggccaaactgggaaaaaggttctgttccataagttcatgtgccaattacacacagcgattaggattcccagatggctcgttctctttttttaaaattttactttaagttccaggatacatgtgcagaacgtgcaggtttgttacataggtatacgtgtgccatggtggtttgctgcacctgtcaacctgtcatctaggtttgaagccccacatgcattaggtatttgtcctaatgctctccctccacttgccttcctccacccctggcccagctcattctcttaaaagaatcacccataaaggagtttagctggcgcaataatggatctgcttgggttccacaacttgggaatcagaaggaagggaaggacttcctcacctttcccaggaacagggctgccctcagcactctctggattcccaaggcacagcccccaggttcctgaacacacagtgtcttaagtgccccccgggaagcccccctgcgcccacaccctcctcccagtgctttagaactacctcctgactctgccccctgagaaacaggccaggaatatttcaatgaatacgccaattaacctcaatgcacctctcctggcacttcagagagagaactcaagagtgaagagagggaaatatggaggaggggtctgaagacaggaagcggtgaccccccaggacggaggtaaccccgtggaatatgcccaagtcagttgccctcaactggtctgtgacaccacaagtccaaaacccaatgccttcatctaaatcctgacgccaccacttgttttagccctctgtgccccacttcctagtgtgaaaagcagggatcataacagcacccagtctgtccgctgtggtgaggactcagcgcgttaagacacgtgggcactcaggacagagcgtggcatggccaacggtctctaagcgtctctgctgctgccatcactgctgtgctcatcagcgccaggtgctgctctcccacctgtccctgtcccaccacagcccgacaattctcagccacaaggagctttggcagtggaggcagggaggaatatggctagaacctttgtaagctgactttctgtaggctggggacagtccacgctaaagggtagctgccatacccccgggagctgcaggtgccaggagtgagcactctgcatcttccccctgaccaagctgctcctcctctcttcccaagcttccaacactggcactggcttcccaggacccatgccacctccagacttcaattggcaacagaaaaaagacagggggctgggtgcagtgggctgcctgtaatcccagcactttgggaggctaaggctggagaatcacttgagcccagcagttcaagaccagactgggcaacacagagagagtttgtctctacacaaaatttaaaaattagtcaggtgtggtggtgtgggcctgtagtctcagctactcaggtggctgaggttggggagatggcctgggcccgggaggtcaaggttgcagtgagccgagatcatgccactctagccgggaggccacagagcaagacactgtctccaaaaataaataaataaataaataaagaagaatgggcaggagagaggagaaggctgggactaaggtttcatttcgcctttaaataggaaaagtcaataaaagctactagttaaccacgtggctgtgctgtccatccctctcctgccagagttaaccagagcgaatctcctgccagagttaaccagactaaattattcagcagatatacaattcaacagacacctgcagatgtgcctaatgcaggaagactcctcactagattccctcacacataacacacgtgcactctgagctgggcgctagagagacacggcctaacagaacacgaaaaagatactgttgtccttgccaaggtcctcactacttagcagaagctcttgcccttccgcttccacctttcatcaagttataagccaacagtctcacttcttctctcttctttaatctgatttctgtcttccctttcttttttcttttaagagacaggatctcactctgtcacccaggctggaatgcagcggcatgattatagctcactgcagcctcaaactcctggcctcaagtgatccccccgcctcagccttctgagcagctgggactatgagtgtataccaccatgcccggctaatttttaaaatttttgtagagacagggtctcactatgttgcccaggctggtctcacctggcctcaagcaatactcctaccttagcctctcaaagtgctgggattacagacatgagccattacacccagccttttcttttactttttttttttgttgagacagtaaggtcttgctctgttaccaaggctggaatgcagtggtgcaatctccactcactgcagccttggcctcccaggctcaaatgatccacctacctcatcctcctgagtagctgggactacagatgtgcaacacccacacccggctaatttttgtatttttctgtagagacagggtttcaccatgttggccaggctagtctggaactcctgacctcaggtgatctgcccgcctcagcctctcaaagtgctgggattacaggcgtgagccaccacacctggcctcttttttaaaactgtggcaaccatctctcctctgttgaactcgccaatgagaaaaagtcaatggggccaggcatggtggctcacacctgtaatctcagcagtttgagaggctgaggcgggcaaattgtttgagcccaggagctcaagaccagcctaggcaatgtggcaaaactccatctctacaaaaaatgtaaaaaattagccaggcttggtggtgcacgcctgtagtctcagctactcaggcggtcaaggttgcagtgaaccatgatcacgccactgcactccagcctaggtggcagagtgagatgctgtcacaaaacaaaacaaaacaaaacaaaagtaatcaactgcagggtttggggtgacagtttcctggtcattcctcccagtttcttggtgtctttatagctagagatggctaaaggccacccgcaagaaaacaactgaggcccatgggggcaggatgctgttctctccaccggagcaacccaaccacttgggtatctgacaccacccatcacccccccaactccaggggatccgagctgaattctgaagagtggaaccaaagatgacagagtgcgtggctggagagagggggaagtccacagagtttaggtaaatttctgaaccacatccccaccacgcccacaatgtactgcattgaagtacactggaagctaaagaccaaaaaggaatcagattttcagctctgccacctaaagcagaaactgagggccttattcaccttcaactctgccacctaaagcagaaactgagggccttatttaccttcaactctgccacctaaagcagaaactgagggccttatttaccttcaactctgccacctaaagcagaaactgagggccttatttaccttcaactctgccacctaaagcagaaactgagggccttattcaccgcacagactttagcccaagtgccatgcctccagtttcacagtttcaccagcagctcaagcaaatggcctggacactaaagatggcctctgggtcagagtatcactcatttcctctgtccacaaaccactttgattctctttgattctctctgtccctcatctccccatctagtctttttttttttttttttgagacagagtcttgctctgtcacccaggctggagtgctgaagtgcagtggtgtgatctcagctcactgcaaccttggcctcctgagctcaggcaatcctcccacctcagcctccagagtggctgggaccacaggtgcacaccaccacacccagctaatttttgtactttttgtagagatggggtttagctatgttgcccaggctgctctcaaactactgggctcaagcaatctgcccacctcaacctcccaaagtgttgggattacaggcatgagccactgcacccggcccatctggtcttattaaatacttcattctctgcaaatgcagatgttttctcagctctgattattttttctaaagtaatgaccctccacctggctagacaaatgcttctagcaaaggaaaagaccagggtgtgaaaactgtactgcaatagaacataaagcccgtccaacccccacctcccatcagacctggggtggtggcagcagcaggcatcggggctctcaggcctgcccattagtcatccctaaggcctgttagcacacaggttaggaggagcacacactctggaatcagaaagcccaggattgagcccagccctgctttcagttaaggctttgtcagtcactatcactcccttgacctaggacctcacaaaaccttgtcatctgtaaaactggggataataagttctaccttgagtgttattgtgaggaataaatgaggtaatgtctatgcagcacctagcacagattcctgcagataaacactcaataaatgttaactatcatccactatctagttatcagaaaagcacaatgatattgtatctttaagtccttccacttccaaaaaaaagaaagaaagaaagaaaaagatgtgtggatttttttcccctaaaggtatcagtgaagtgaaatttaagaaggaaaacctgggccgggtgcagtggctcatgcctataatctcagcactttggaaggccaaggtgggcggatcacctgaggtcaggagttcgagaccagcctgaccaacatggtgaaaccctgtctctaccaaaaatacaagaacagccaggcgtggtggcgggcacctatagtcccagctacttgggaggctgaggcaggagaatcacttgaacccaggaggcagaggttgcagtgagctgagattgcaccactgcactccagcctgggtgacagagtgagactccatctcaaaaataaataaataaataaataaaatcaactttatggagaaaaatttacattcaagaaaatatgcccattttaagtgtccaactggatgaattttcagaaatgtgtgcacccgcatgaccacttctacaatcgtgatacaaaacatctccataaacttaaatccctgtagccctttgctggcagttcccccacccacccccaggaaacccctgatctgccctctgtcactgtaggctagttttgccttttccagaatttcatatagagggagtcatgcagtatgtactcttttgtagctaatgtttttgagattcgttggtgttgctgcattgttttctactgcggaatagtattcccttgtacaaatgtaccataatttgctcatctactcttctgtggctggacttttcagtttggcgctaatatgaatcgtggaggcagttttagaccaaatttaacttaacaatacaatatggagtgattaagtcaagctaatgaacatacctgttacctcacttatttggcattcttttatggtgatacaccaaatttcctcttattttgaaatattcgttattattgactacagtctcctgctgtgcaatagacctcaaaacttttttctcctgcttggctgaaactttgtaccttttgaagacgaagtctccattcccttgttctaccaccttgccagctctggtaaccatcattcttctaccttctacttctatgaattcagctttttttttcttttttttttttttttgagatgttgtctcgctctgtcgcccaggctggagtgcagtggcacaatctcaactcactgcaacctccgtctcctgggttcaagtgattctcctgcctcaagtagctgggattacaggagcccaccaccatgcccagctaatatttgtatttttagttgttaaggagctggttcctggggccatttgtggtgcagggtttgttgttaaggagctggatcctggggccgcttgtggtgcagggtttgatggggaagacagccccatcttccccgcttttttcttcatcactctaagttttatcaatttttttatctctctcctttcagatctgtcaggttttgcttcctatatttttaatccctattttggggtacatatgcagttaagattgttatatcttcttgatcacttgcaattgtaattataattatgcaatgtctgtcttcatctcttaaatattcttgttctgaagtctgacttgagtaatattaatatagccactcctgctttcttacaattttaatatttatatatacgtatctatatttctaatcttttaatctacctgtgtctgtatattttaaatggattttttgaagataacatctaattgaatcttgcttttttattcagactgataatctatgccatttatatttaatataatttttatgacattgagtttaaatctgccatcttgtcatttgttttctttttgtctcgtatattctttttttcatttttcttgcctcttttgggctgttttttggtattccatgttttctccaacattggcttattaattatacctctttggttttcttctgttttggtttagttattgctctagggcaagggtcagtaaacctttcctgtaaagaaacaggtatcaaatattttaggctttgggagccatactgtctgtgtcacacctctgctgttgtagcacagaaggaactgttacataatgagctcagatgtgtgccagtaaaactttattacaaaagcgggcggtgggccagaattggcccatgggctggagtttgatgaccccagctctatgtcagtctattttcaaataatcttacactagttaacatagagcattttaaaagtatttttccattttttctttttatgtaatttttgcacaaaattttttttgtgaaattatgttttcactttagagagtacattatcttctaaattaaaatgattcaaaaatgcttgttgaagtgtattcacgtatttaaatacatgaactgtattcacgtatttactgcttctggcagtagtgttccttcctttgtgttgatccagatttccatctggcttttttttttcttttgcaggaagcacttccttaacatttcttatattgttgtcctgccactaacaaattttctcggcttttctttgtctcaaaatgtctttatttcatcttcatctttaaaggatattttcactggatatagaattctgtgtcgacagtcattttttttaagcatcttaagaacgtttgttttgttgttttctggcttgcatgggttctgacaagaagtctgctagtagtcttatctttgtactttgtatataatatacaccccacccccagctgattttctttgtatttatcctgcttatggttcattgagctccttggatttatggatttatagttagtcagatttgggaaattttggccattgtttctttaagtattttttctgttcccctcccctttttccagtactccagttttacatattttaagtcactaatattatcctaattactgaagctttgtactttttgttttttggttctcaatcttttttctgtgctttaatttggatagtttctgttcctgtctttaagttcactgaccttttatcctggagtatctaacctgcccttgatttcattcagtggagttttaaaatttcatttgtttttcatgcctaaaaggtctatttggttatttttttcatatctttggtttctccttcatttttgtagtctgttgctacgtaacaactttctccagaagttagcacctaaaacagcaggcatttgttgtctcgtgaagtttttgaaattcaggaacccagagcagtttagctggatggttttggcccagattctcgtcagagggtgcagttaggggcttttgtcctgggttgcaaagctgaaggcttgacaggggccagatgatgtgcccaaattcatttaggtggcccttggcaggagacttcactttctctccatatggacctctccataggtctgcttgagtgtcctcacaacatggcagcgttcaacgcagagtgagtgttgaatgagttaggaagagacagacagagccagcccaagatggaagctacagtgtattttataacataatcttggagttgatctactatcacatctgccttttttttttttttttttttttttttttgagacagagtcttgctctgtcacccaggctggagtgcagcagcactgttatagctcactgcaactttgaactcctgggctcgtgatcctcccgtctcagcctcctgagtagctgggactacaggtgcacaccaccatgcctggctctgccgttttcaattgatcatgtaggccaaccttggtatgatgtgggaggagacagcaccagggtgtgactgccaggaagcagggtcgctcagggccatcctgggagctagcagccatccccttcactgtgttcaggttttcctgtaaattctgcagcatatttataattgctgttttaaaatccttgtctgctgatttcatcatttctggacttatttctattggctgagttttctcctagctatagaacacattttcctttttttgcatgcttagtaatttttgattgtatgatggtaattgttaattttatgttaagtgtatgaaagggtgcaaatttccttgttctttctttgaagagtattgggctttttctggcaagcagttaagttattttggggtcagcttgatcctttcaagaactgttttcacactctcttggggcttgtatggatttgcttttattccagggctagtttaactctgctactaagacatgacccttctgaggttcctagcagatgacctgggtgctcagcaagaacacttgctctggctggtcggcatgtgcctgtccccggtcctgcgtgacctctggagttgttccctgacagctccccgatgtgcttggttcagccttgtggagttgcatgctgtgtgcgtagagtgtattactcagcagctcagcgagacctttctccaggttgccagaagccttctgtgcacagctccgccctccacagatcctcccttcctctcagcaggaccatcatgctgagcttgagctgtaccccacggcgccaagcctggaagagaccactgggtagagcaaggggtgttcagaggttcacttcatttgtttctctgtctttagacagcccagtgtctgtgaacagttactgtgtgtattttgttcatttttctagttgtttacaacatgaaggcagacctggtctcagttgcccagcatgacgtcccagatccacatgtgaggaggagcagcagcatgggggttccgctgcgagctcagggcaggggtctgtattccaggaacttgggtgggcttcatagacccctgtcgttcccagaattataggcagcacggagtgtgcttgtgcacactttcctgggtggagaggcacacggcacctcacgcattgaagcgttgtggcccctcggggagttaagacccagtgggaggaggaccagggcggggggcctggagatggaaccgcaccttcccatgctgcctcgctaattctacaaatactgttgacatcctgtgcgtgtggccttgggcagaggggtaaagaccgggcagccctggcaggggctctggggccaaggatgtcaccttctgggggtaagagcgagatgtccttccagagcctgggttttgagaggaggtcaccctggcctggttaggatgagttgtcatcttttagcttttggtttggtttctgtttgtgtttattttcactttttgccatggaaagttttaagcatatatataaaaatatggaaaacagcatcgagaagtccctgtgagcccatcccaccctcttcccccttcctggattattctgaagcaaatccaaggtatcgtaatcaatttagctgcaatcattcaagtattgtagcatgtgtctctgaaaggctggtgactccataaagccctaaccagagtccttttattgtggtaggacctggtctcggtgggtgaggacagtggggaaaggggcagcgtccagcagggtgaccacctgtgcgaaggagaagagagacaaagcacctggtgttggaccagacagggggctcaggaccttgggctgcagttgaccacgtgaggcccttagcctccagagaaggagctggtttaacatgacccatggttgtggagaccttgcttcctaggtggggctgccgtgcccctaccatcctcccacataagcacgttacagagatctgtggagccaaggggctagttcaccaaaataagacctggccgtgtccaccactctgctggtctggctggggctgccgtcacagagccccacagcgggggctgagaccgcagatgtgtgtctcacacagttctggaggctgaaatctgagatcaagggtcaccggagttggcccctggggaggactctcctcccggcttgtggacggccgccccttgtattcctgtgtggcctttctcctgtgcacttggagagctctggtgcccctgctggatcaggacccacccttatgaccttcatcagacttgacttccctccttaaaggtcctatttccaaatacagtcacatggggattaggttagtatctaaatttgggggacacagttcagactgtaacagttgctctgcacagccccgctcggttacatcatagatgtttgcacacatctgtgcacgtgaactacgtgttatctgttgcacatgcagcgttactaaacagggttcccttatacctcccggggttctcggagtggcgtcttctcttttgctgggaaccttgccgcctttcctctccctgcccctcccagcccgtgggccacctgctctcttccacgccttcctttctcctctgcttgtgcagcggaaggttctgccagcaggggagttagtgagcagccagtggagggtgtgcccagccttcctgctgcagacccgcccccaagtcaacacggacttccctccctgcgcgccagaactttgcgttgttcttagtggcatctggggtcgaggagggcgactgtcagccagttgggggatgttttcttcttggtctctcggcttctgcttccctgtgagctgggcagcctcagcccaggtcctatccggtactcagctggcctcggtgtgcacagcgcaggcttgagtgcagccgtgggggcgggcggggcagaagcagggcccctgggaacagctgagtctgaagggtcagaagccacggcccctgtggggggctctggggcagccaggggagctgctcgttagtcgtctctggggcagaaggaagggaccttcacctgggttgggactgggcctgggtccccagtctcacagggagctcgtcctgattgtacctgcccggctgtgacggctgagcccgggctcctggaggcaaggccacctcaggcctccagggccggagccgcaaggagctgctgggtttccacagggccacgggggctgcggccacacggagcgggagcacaggtgggaagggtgtctgtgaaaaatgaaatctgttgccgcttcctctagcttaattactggcatggtggttgcagagttgaaatgcagctttaaaagcctttgtgagtaattagtgtcaaacacacaagatctacaaagccataaactcacagcttggtgatattaccaagtactaattaagaaagaaaaaagaaaattccctttcatgatcaaattttgagccctgccaaagatgaaaaacaaggcaatttgcagccgatggcgacgccggagggtaagtggcgtccacaggaagatggcggccgagcgcggcgagcaggcagggtctggttgagggctggggtggtgacggcgtgattgtgcctggctaccgggttctcagccaggcagcacctgattcccaggagagatggaatcccagctcagaaaggggagactcatgcgagggcagaggcaaggcacccgcccagaaggattgggggtctccccatttcacaggtggggacactgaagctgagctcacagccaggagagggacagcagagtgacggccgagaccatctgcactgcgagggaagcagcgcccaccttccttggtggtccgggaaggccggaccggccccttgggtccccactggcctcagccactgtgggctcgtccagcttcaggtaggcgcccggccactcacctgggaggctctgagaacgacagcttctgtctcgtgagtgacgtggtgcccgctttcatcctggggcccacagctgccaggagaggccaggccgaggtcaggaggctcagcagctggttccatgacttcctcttcgctgaggaggtcaggacagaagcttctagatgacaggccgcccaacttggtataaaacagcaaatttctgtgcctgtgctgtcgggctgtgaatgacttctcgtctgtttcatgagatgcagcttcagcccagggagccatcagatgcagccgggcgagacgcggagccaagagctgtcctcgccccccatgtgagtgactggagagacgaaattctcaaagtcttgtcacttacggggatatttttaacccaggaccagggaagcacagctctcattggtggccgagtgctctggcgcttgggcagtgggcagcagccaggttatcgggacgtgctcaggcccaacaggacccccagagccgcacctgccccccacagagtagagccggcccgggagcggccttggtcacatctaatcccaccagccgccgacagtggagagctgtgcctggcccagagatgtgggcatcacatccaggctgcaaacacacggggaccacctggccccgccagggttcgctctatcctggcttggcctgcatggcctctcgccgtctgcatggtccactcacccgagtcagggctggggcatgcagggagtgtgcagtgacattgggcagagggaggctgctcaggtccaagtaggcagagaaaccgcatgcccaggccgctaaaaccttgaactgcaggagccctgagctgctgttgctgttttattgttttgttttgttttgttgtcagatggagtctcattctgttgcccaggctggagtgcagtggtgcgatcttggctcactgcaacctctgcctcccgggctcaagtgattctcctgcctcagcctcccgagtagctgggattacaggcacccgacaccatgcctggctttttttgtatttttagtagagacggggttttgccatgttggccaggctggtctcgaactcctgagctcaggtgatccatctgccttggcctcccaaagtgctgggattacaggtgtgagccaccgcgccgggcttgttttactgtttatgacgcggctctgctgccgctaggacagatacttgtacagcccgattcaaagactgtgcagaggcgtctcccagataccccagggtgcactgcagtcaaggaaggctgcctggaggaggtggcctggagctggggctcacaggtgaattagagtttgtctggctgggttggggagatgtttctggcctcaggatctcacgtgctcatgctcaccggctccagggcacccagcgtgcagggagagcagaggggtaggcctcgggctccaggccaaagttggggaaagagagtgtcagacctgggcttgggggacgactctgatgtcgtcctcatgggggatggttgagtaaagggtggggtgtggctcactcgtctggccctcgcccatgtggaatgcccaccgtgctgggccccgctgcaggtgctggacgcgcagcagtaatgcgggggtcctgctccgcctgggcacatcttccagcagggattggagggccgatggccaggcagggtctgtgctctgtgtctaggtggttacggggggaggcggggagcctgggccttggctgtgggtggacctgtggcttgctgacctggtgcccagctgccccacctcccaaactgtgagaagccaggaccagccccatcctccatccagatggtctctgacgttgccctgggagccgggggggaggggtgggggatgttctaactgaagggcctgggcggcctagagcccttctgtatcttctggccaatggttttatctggtccactgcctcccaagcctgcacatcccatcacgcgcatttaaactgttaaaaagttactcccttgactaagccggaaatgctctctatggccctgtggatctgcgtccagttccccacgacattccgtttttggaggctttgtgaagaggctgggggtttgtcagccccactcggaagcgaacaggctggttccccgccccagtcccagcttctcctgcgggcagctggcctgagagccaagcactccccaggccatggcaccgggtgggcaggacgctttcctgccaggcaggaggcagagccctccctgggaccccgagtgtctgtcctgggtggggactagacagtgaccaccacctcgaccccgggcaagcccacctagccctgcccccccaccaagccctgctccacctacacgaagctgcggccagccccttttgcccccaacctaaatgactgagaagtctgttagggagggcctccctgtcactctaaagagcaggaacaggacatccctgccccagggcacggaggcagctggccatctgcgagtgggacccgccacggttggccaagctcaggccatatgagctgggactggcaggcagttcctggctgcctcaaatctggggtccagactctctgctgacctcccagagcccggcgtgtctttgcacactctgtccttgtccccagcctcctccccgccccagggtgtgcctgggactttaggtagtcttacctgtcagtcatactttcttctcggccagggactgtggacggcaggacgttcaccccgtggtcagtggctgggcctttctcatgaagcagcttgattgagatgtcatctacagagcgtgcagccatcatcacagtctatcttggaatgaatgcctttatcaccctggaaggaaacgtgccccatagccatcccctcccagccatcggcagccactgtctgtgttctgtctctagactcccctaccggcagtgttgcagggagatgggctcagcgatgagtggtctctggcgtctggcgtctttcactgaacgtaaggttttcacggttcgctcacattggaccacgtgctgacgctccatttgttactgatgaatcatacagtctagtgtgtggatagaccatgttgtttatccgttcatccattgatagaacatttgaattgcttccgtttagggctattacacacagtgccgctgtgaacattcgtgtacaagctt

SEQ ID NO: 23 - DNA, 150038 bp, Homo sapiens
gaattctactcttaaagaatagagaacagaaatcaaacagatgtttgtatactaatgtttgtagcatcacttttcacaggagccaaaaggtggaaataatccaaccatcagtgaacaaatgaatgtaataaaagcaaggtggtctgcatgcaatgctacatcatccatctgtaaaaaaggagcacaattttgatagatgatacaacatgggtggacattgagaacattatgcttagtgaaatacgccagacacaaaaggaatatattgtctaattgtacttatatgaagtgcctagaatagtcaaattcatacaagagaaaataggataggaatcaccatgggctggaaatagggggaaggtgctatgttgcttacggtggacaaggttttgtaagaaatcatcaaaattgtgggtgtagatagtggtgttggttatgcaacactgtgaatattttgaatgccactgagtgcacactttggttaaaaggttcaaatgataaatattttattatacttattttcccacaatagaaaacacacacagccaagcccagatgccagtcttgccagcagccttcctttgccttcaagattaggccatcatgctgtacctccaacacacaccaaggcacctcgctcacgcaaggtgtgtgtcctccaacaaagtttcacactctaaacccagataacttttgaaacccaagttctgttgatcccctacttcaggtgctccatagatgctcctttgtctacaaaacactgcctcagacaatgaaatagtccaaagtgaccagcagaatttttatgttaattctgatattgtgctgttagtacaagtatttttccccttcagatttatgtctttgttactgataaatgtaactgataatgcttttgtcagctatgttgccaagcatatttatataaaaatatactcttagattgttttgagaacttgacaaagatgatagcaacaatgataatcttatttgttttatactaatctttatgtgttactttcatcatttcttacatgttggggcctaccatacattgtacagtgaaattagtgctatgcatcatggtaagaatataaattggcaaagctaatttagaaaacagttctcttgtttctcaaaaaaattaggccggacgcagtggctcatgcctataatcccagcacttagggaggcagaggtgggtggatcacctgaggctaggagtttgagaccagcctgaccaacacagcaaaaccctgtctctactgaaaatacaaaaagtatccaggtgtggtggcgtgtgccggttgtcccagctactcgggaggttgaggcacaagaactgcttaaacctgggaggtggaggttccagtgagccgagattgtgccactacactccagcctgggcctcaaaaaaaaaaaataataatgaccaaaatgtcattatgcattacatgactgcgtatgatgctcaaagttacactactcaccatagaaaaaaacaaaaataattaaatgtccattaactggtaaatgaataaacactatctgtatgaataaacacagcagactatgaaggaaaacacatgaccagcacctgctaaagcgtcaattaacttcaaacatagtatgctaaatgaaggaagtcagattccaaatatatatatatgtccatttctattaaacaagcaggaaatttatggagatggaatatcatagcagtattgcttagggctggagatgggagtggggattaactgccagtgtgcaagaaagaacttgggtgagggaaacatttttaaattagatcatggcgatgggtgcacacagtatcaatttaataaagcatcaaattgtagaccttttcagtgggcaaactttagggtgggttcacacccaatataggtgttaaaaataaattaatgttatggcaattctggttgggtttttaacaagccaagagatatgctgttaaagcagcattaattcaaatggttgtcacaggtcacttaaagttaatcagatagttgtcctgtaaatatatagcgaatgttatccatgaacttcctgaatctattgcaataatcacattttctctccattaaccttttgagttagctaattttatttatcgcattttcaatgttaatccaccatttcatattttgagattaacgcacatgagtcagaattcacagtattttaaaatatcgcagaatttaatttaccttatctggttttggtttcaagactatactagccatttcatttaattgtacatgtagggtattctaatttatggaaaactattacatctttcttgtttttttttttttttaagaaattacttctagggatctatatggtagagtccatggagaattgttttaattcttcattcatgtcttcagtgggtataggattggtcatattggtcatagttttgtgctcggatttcaataagaaacttgtggaagaacctgaagggtgggatctttgagggagcctaagacagagcaagacaagctaagaaggagggcagtgccacagcagaactgccattgatgccccctcgcctagattgcggaagagacatccagctgtagacactgaggtgcaggaaaacaatggagcaccatcagagaaagcagtgcccaggaacaaggaggcactgatggtggcaaggggcaaagacagctgccacgaggctgttcacatgagggtctcaggctgcatagacacccacaccagctgaggggtcctggttttcataaagtgtgtggctcagccaggccaccaacaagcagttcacaaacagtagtaatacgacactttccaaagaccttacttgagtaacacggtgatcctcacaaatttccaatcaggatggtcgcacagttccatctgctttaggacacagagcctgcccgtgtctgtcctgtctgctgaccacgggtcagaggtgcaggctgcactggggagtaagaatgtcaccttctcaactttgggaaaactccctgccagaactgagaatggccctttctaaagaaggaggctgaccacatcaggttggcagatggccaaagattcactcagggagagcccacatcctgggccatcttgggtggtggcaagatgagatggatgactgcttttgcaacacatacctgacaacaaaaaatcaacaactgtaagagagccagaaaatctccaaatatttgcacattagcaatgcacttttaaataactcatgggttaaataagaagtcttaatagaaagttaaaaatacctttacattaaatgaaaatgtgacttgacaagatttctagatgtaacaaaagcagtctgtagaggaaaatttatagcattggattcaatatattaaaaatcacaagatctaaaatcagtaatatcatgtttcaattaggaaactgtagaaaataaaggaatgcaatgtaaagcaagtagaacaagtaacaaacagcatcacagaagtcaataaaattaaaacactgaaatcatcagaaaatcattaaaacctaaagctggttccttgacatgctcattacaatgaatgaacttctatgcaggctaaccaagaaaaagaagataacacaaatgaccaatttcagaaataaaagaagagccgtctctactgaactgttgagcattaaaaggataatcaaggaatatcatgaacaattctatgactgcagtttgataacctcagtgaaatgtattaagtccttgaaagacaattttcccaaggtcaactagaatcctagatcatttgaataagcttaggtctgttaaataggttgaattcacattaagagcattctgaaaaagaaagcaccagacccagatggtttctctcatgaaatctaccaaattcttcaagaggtgaataaaaacatccactcaatgcaatattatttggtgatttaatgtgcattttatgccattaaggcataaaaaagacatgaaggaagcttaaatatacatcaatttagtgaaataaatttatctgaaaaagctacataatatatgattccaactatacgacgttctggaaaaggcaaaactgaagctacagtgaaaatattaatagtcgccaagcttcctggagaaagaggacagagattaatgagcgagaagaggagatttttaggaatgtgaacatattctttatgagaacataatggtgaacataatgttatacatatttcaaacttcacatgtatgtgtaacagaaagaatgaacattatgcaaatgatagacttcagataataatgtcaatattttctcattacttttagcaaatgtaccacattaatgtaagatgttatgttaataatagatgaaattaggaagtcagggtgaggggacagaatgatatgggaactttgtgtattatatgctcaattttttttttttttttttttttttgagatggagtttcacttttgttgcccagggtggagtgcaatggcgccatctcggctcactgcaacatccgcctcctgggttcaagcaattctcctgcctcagcctcctgagtagctgggattacaggcgcctgccaccacactctgttatttttttgtatttttagtagagatggggtttcaccatgttggccaggctggtttccaactcctgacctcaggtgatctgcccgccttgggctcctaaagtgttgggattataagcatgagccaccacacctggccatatgctcagtttttatgtcaatttaaaactctctagttaaagaaatatattaatttaaaaataataatatagcaccactctttcagggagatctatgctaatgtttaaccatcaggtaagttctagacattggcttgaaacattgtccatccttaaacatgaaccaaaattgacttttaagtggatatttacttttgtggttgtagcaatacttactgactaagcaaattagaattctgacacattaaaaaatatggcttaatctcttcatagattcctcttacatatgggacactgaatactccccacaactgcgattattgaatcaacttaattaatgaacttccacagtaccttcttgtggctgtatcttctttctccagaagccatgatgcctccaatgctggttggtgtacaggctgtatcttctcaaaatttctatcagagaagatgctggttaatgcatttacaatagagaggactgttgacaccttgctgacagaagaccagaagaaaatagtgatcatgtgttccaagtttaatcttatgatcccgctctttaaaggcttccaagcagagcccgctgaatcaaagttgggtttcaggaagatcatggagttcactgagcattcaacacctctatcagacagacttcgagggcagtgaaggctgactccatatcacacagagacaacttagatctttcttctcagaagtccaatagtcttcagaggaaccccccattcttacacaactatgtcatccaggtctcaggcaaaagcccccagtattttgtaaaatttgagctatcacagttttactagcttttatgttattacaaagctttgtcctcttttagtacggattttagcaacagtgacctagttagtaagaaatagaagaaactactggaagaaagcgtggaaagaacacacgaggtaaaatttgacctaaaatgaccagtctcattcactaacctcaccatagtcttatgggttcaatggacctgtccaatcctttgctctgttctctccatcaccttcctgtgtaattgtcctccaccccacatataatagaaacattgcacaggggagctaatcacctcttttatcccccacttcaggctcatgcataagtttacagtaaaagccttttcaaatgactgctttaattgctgctacggcacgtatcatcagttgaatgggaactctcatgtgactttaagcaagcctttattgagagatgtgattcaatactagggacagtattctagtgtagtaaatcattgattttacgttatgaagatcatcaattattgaaaatgtataaataacgaagcccagccttactcttcaatgctgtgtgtgtaaatccactgagcgtgctgacccccatgcttacacccacctgctaacacagggaggatccattcagaagggaggcacagctccagcactgacgctctccatgccagcttcacaagagagttgccatgaacagacacccagataaccaccaagtggtaatttgagtactcaatgatcatgatccctaaagtacgtagctcagagggcttgtggtgaactgtggccaagactctaaagcatctccccaattcttactggacttaagccatgtcttgaggagacccagctatgacacgcaggcaccacattgtcctacttagtgcctcccttagtgtttcagaacctgtgatttgatcagaaacatgggctttctatgttggtttcacactaaggactatgtgacacctgcaggaagatgcctacatagctacattataagatcactgagcctctcttatgtgagggatggcgtttgggatcgctgcaggcgtgggtaattccaggcatagagggtgctggaactcccttgcatggtgaatagtgatcccttcactggctgataaatagaagttgtagttcaggccttcaacaatgggaccgtatgagtaaacatcttggctcctcacttcatagcaagtgagctggggcacatttatttctgtggcttagtttctccatctggtgtgggggttcaataaacaagctcacaacatatggccatgatgaggtttgaactaatgtaagtaaagtatgtggtctgatttgttaaattaagaaaaatggccctgagagttgtgctgggtaaacacacttttttcctaggggcaacacacatagacacacattcacaagcaaatcaagcagacttgcatatagaccaccccaccccacccctgccttaatacacaccccccacacatgacctaatgtgaacaccacctaatgtgaacacgtttccaggaactatacataggtaaaaagagtttgtcacctggaaaaccagtttcttttactataccccacatcctcattcccaccaggtgtcttggatcatggaagctctccagaccaaagccagcagttaggctccagatttcctacagaatctttttctaacagccagtgagtgattccagaatacgtaccattgattgggctcaatgaagtcacctgtaactagagaaggaaaacactctgagaatcaggctatgctatggatggttcgcacaggtcttttgttcacttggaaactctgggcaaccaagatgggaaagaatgttcaagtcaaaagccccaactctagagtagagtttccttaggaaagcactggagcttttctggaaggatgtttctatctagacaatttttgggtagcaattacagaattcttatctaaagtggaaaacttgttcctgaagaaaatatcccttaacatgcagtgtactatctgacactgccaattgtgtatgtcctctggaatcaggtgtcagttggtaagatacacctcctccattgccaaggaaacattatctaacatctatagtgtagtggataattttcccatagctgatatcaactgaaaaataaaggaaccaagaaaacaacatttacatcttaggcaaagacaggctactttaccatggtagtagagtagggctcccttttcacacgctttttggaaggcttcttcaagtcacctaggggatgtggaaggacacagcatggctgtcagttcattggtggtgctactcatgaatgactcagggactagaacttaggggtgtgcctggttaacaagcatggattgagcttcttctggaccattctcttcatggaccaaggaaggcaaagaaagagcaggaaggaaatgagtagagcccttggctttccaggcaatggcaaatgaaagcaacatgaaataaacaaactccaaatgaacaaatactaaaatacatgctaggattcaaccacagcgtcctgtcacttcttcagatgctttaaaagcccacaggactatcacttcttcttgacatctaccaagtccctttcaacctccacagacccacatacagtgctactgcatttatcatcgagggtctggggttctgctcttttttatgtgtgaattttttaaaaactagatttaattccatgcaccagcattaattatatttatttattttctttgttataaaaatattcagccaggtgtggtggctcacacctgtaatcccagcactttgggaggttgaggtaggtggataatttgaagtcaagagtttgagaccagcctgaccaacataatgaaccccgtctctagttaaaaaaaaaaaaaaaaatagccaggcatggtggcatgtgcctgtaatcccagctactcaggaggctgaagcaggagaatccctcgaacctggaggcggaggctatagtgagctgagatcgtgccactgcactccagccagggcaacagagtgagactccatatcagaaaaacaaaacaaaacaaaaaaaccggcagggtgcagtggctcacgcctgtaatcccagcactttgggaagccaacgtgggcggatcatgaggtcagaagatcaagactatcctggctaacacagtgaaatcccgtctctactaaaaacacaaaaaattagccaggcgtggtggcatgcgcctgttgtcccagctacttgggaggctgagggaggagaattgcttgagtccaggaagcagaggttgcagtgagccgagattgtgccagtgcactccagcctgggcaacagagcaagactctgccaaaaaaaaagcccccccccaaaaaaatcaattattaaagattagaaaatactgaaatgcttatattttaaaataaccactataaccgtacattttccgttcagtcttcctttgccctgtgtttgcagtcatcatgtgaggggctacctatgttcagcccaggcaacccacagggagagagggcagagcggggagatggcccctggtgagcactgaggctcttcgaaccagctgtcaagggagttgcaaccagggtgatacatgagattaatgattaagtggtattttgtgttcttgtcttgtccccaggttgtgtagctcacagacttttttttaacatttctttagcggtcatttgaagttcataatgccatcaaatatcaataaagggtcttcccattatttatcagctttgggatatgtgctgaggagtggccgagcgctgaaagaatgtgatcggttgtcccaagtgctgttctccaactcaaaatccgcaaccagttcaaaagcatttggacttttatgtgcctttcacataaagactatgacatacctaagttattcatgtactaatacctgccctgagctatgtgaccatggacaccatgctataatgtggctagtgtgtaggaactctgcaggctcagatcattccagacatacatgcagatgttggaagtcctttgcacagtgactcatgatcccacagctgagtgctgagggcaggtcagtagttcagagcctcagcattggggccctatgcttgggttcccatcttggctcttttgcttaggggctcataagcttgggcacattcatctccgtctttttctgcccagcaaaagatgatagtaaatcaatcatgccatatgtctgtggtgatggctgaatgattcaatgtaggtaaagtatacagcataagtgctcatgaggcttaattatcagtgaaatgtcttgctttagatttcacagcttaataaggctcagagactcattcaagtccaggattctgaactcccaacccattgctctatgaaatacacctgcttggcctaaacccaaccactttatcataattcagacccagttttgaaagaagcagataaagttgtcaaaagtgctgtgtctgcctgagtgcacactcagtgccctccatgataaataatgggaagaaccgttattgatatttgatggcattacaaacttcaaatgacagctatagaaatgttaaaaaaaaaaagtctgtgagctacacaacctggtgacaagacaagaacacaatataccacctaatcattagtctcatgtatcaccctggttgcaactcccttgacaaaggataccactatctgccacaacgacccagtggcctggctggcacagacaggggcagagcaaagggcaagagatccctaatcccatcactatgacgatagggcatcatagacagttcagggtgaaggcacaatccacattgtgaggtccaactgctgccatgtagacaggcgtgcttttacatatacaggaaggtcattgaagataagtgttttatatccacgatcaacatatgagatgaccatgaaatgaacaccagtgtactgggtggagcagcttatctattcagtcttctgcactaaaacctgtgaaagaatatcatgttgccttatttactaacaaatacaagtgcctctaaacttagtttccaactcacagaactgatgagcacttagctcctagagagagctctggatgatgggtcgggagaactaagtcacacaatacatcaaaacagcattaacaagtaaacaggttttcaaagctttctacatgcaaacttacacaattatccctttaatttttatcttcatatatatgtatatgatctatttgtttctgagtataaataaaactgtatgttcttagttaacagtctctaccaattcattctatttatctttctgtgttgaaatactgcatttcattgggaaacaaaaaaaaaaaaaaatttgactaagactactctggaaaggtgagtaggttgggtgattgactgtaattgacaattctatgattttggataactcccaaagcataaaaataaatgttttttatttcacacacagacaatacgcattcttattacatttaaaattgatatgtgaatggacatgacttactacaaatttattaaactaaatacacatttcacaacaaaagaagagaggaaggaaaaacatgtcaaaaacaaagataggtacattttattgtgtgaaaagcctcaaacccatctgtactactgtggcttttctccaaactttttgaaagtaatgatttcataggttcttaattaggttaaaaactacattaaaatagactttgccatattctcctcaagggaataacttaatttggggcgggagcattgaagggtgcaggatgtaaaaggaaatgatacatattttttaaatgaagaaaaagttcaaaagcaccctgcttgatacaagaatcaaatatataaaatgaggaataaaacataaccacaaaacttatttataactgcatatggaaaatacagaggataattttttaaataacatattttgaaagtattaactagtaatttgaaaagacagcatttgacaggccagtatgaacatacctcgaatgcaggaaaagtggatccccataagaaaaatcaaaatcaggaaaaatgaaagcacaaaggttcaatctgctctgaccttcgaaaaactcagcacagacagtggcacttaagactgagggcaggagatccctaatcccatcaccacggtgatggggcatcacagacattcccgggtgaaggcacaatccacactgtgaggtccaattgctgccatgcagacaggtgtgcttttacatgtacaggaaggtcattgaagataagtgttttatttcaaaaactgaatcccaagcctacacattattattctgtgtttcttaaaataagttatgagatgggaaatagggtacccctaaatatagccaatagtgagaatttcaaattgaagaggggcacaactgattattctgaaaacaagcagagattccattcttttttttctttttcaacttttatgttagattcagggtgtacacgtgcaggttagttacctgggtatattgtgtggtgctgaggtttggggtatgaatgatctcaacacccaggtactgaacatggtactcagcagtttttcaaccttttccttcctccctccctctcttagcagtcctagtgtctattgtcaccatcttcatgtccatgggtactcagcgtttagcacctacttataagaacatgaggcgtttgttttctgttacattagttcacttagtggcttctagctctagccattttcccgcaaagaacataatttcattcttttgtagctgcatagtattccatggtctatatgtaccacatttttatccagtccactgttgacgggcacctaggttgatcccatgtctttgctatcgtgaatagtgttgcaataaacatacgagtgcgtatgtctttttggtggaatgatttgttttcttttggatacatactcagtaatgggattgctgggctgaatgttagttctgttttatgttctttgagaaatctccaaactgctttccacagtggctgaactaacttacattcccaccaacagtgtataagcatttcgttttctccttatccttgccagtatctgctatttttttttacttttaaaaaaatagtctttctgactggtgtgagataatatctcattgtggttttgatttgcatttctctcatgattagtgatgatgagcattttttcacgtttgttggctgcatgtatgtcttcttttgagaagtgtttatttgcccctttttaaatggggctgttttttgcttgtggaattaagttccttatagattctggatattagacctttgttgtacgcatagtttgtgaataattccccccatcctgtaggttgtctgcttactctgctgatggtctcctttgctgtgtggcagctctttagtttaactaggtctcacttgccaggttttgttgcaatttcttttaaagacttagtcatgaattatttcccataggccatgtcaagaatggtacttctgaagtttttcttccaggattattgtagtttgaggtcttaaatttaaatctttaatccaacctgcgtaaatttttgtatatggtgaaaaataggtgtccagtttttttctttttttcttttttttttttttttgagagggagtcttgctcatcgccaggctggagcgtagtggccatttcgactcacagcaacctccgcttcctgggttcaagtgattctcctgcctcagcttcccgagtagctgggattacaggcacgttccaccatgtccagctaatttttgtaattttagtagagacgggttttcaccatcttggccaggctggtctttttttttttttttttttttttttgagacggagtctcgctctgtctgggtgcccaggctggagtgcagtggcgcgatctcggctcaccgcaagctctgcctcccaggttcaagccattctcctgcctcagcctctcgagtagctgggactacaggcgcccgccagaacgcccttctaattttttgtatttttagtagagacggtatttagtaacatggtatttcaccgtgttagccaagatggtctcgatctcctgacctcgtgatccacccacctcggcctcccaaagtgctgggattacaggcatgaggcaccacacctggcctttttctgtaatttctaaaagcttcttatatctgcaggaatgcacagattgactaagtcaaaatgtttcagggactaatatttaataatttattaaacattggaaggccaaggcgggcggatcatgaggtccggagatcaagacaatcctggctaacacggtgaaaccccgtctctactaaaaatacaaaaaaaaaaaaatagcctggcgtggtggcaggcacacacacacacccacaaaactatcaagaagattattcagagtagaaaaacagaaaggaaaacagtctgagttgaggagggaaaaggaaacaggcatagttttagaaaaaaagaaatgagacgagagatcatgtgaagacttaaagacttttaggaagagatctaaagatctgcactagaacagtggtaaaaaatcaaagggatgcaaaaccatgcagagaaagataatgagaaaaaaatattaattggaatcagagaacaaattaaagttctcatcaaatggaaaagcagccatatttggggcttcaaaggcactaaggaaaattttttttttttttttttttgagccatcttggctcactgcaagctccgcctcccaggttcatgccattctcctgcctctgcctcccgagtagctgggactataggcacctgccaccacacccggctaattttttgtattttttttttagtagagacagggtttcaccgtgttagccagggtggtctcgatctcctgaccttgtgatccgcccgccttggcctcccaaagtgctgggattacaggtatgagcccaagacggggtttcaccttattggccaggttggcctcgaactcctgacctcaggtgatccgcccgctgccacctcccaatgtgctgggattacgggcgtgagccatggcacctggcctctttttccctttaaatattgaagtccccagaccctctttggaaaaaaagcatgcatcacaaatgtttcctgtgattttcattccttttttctttggcctgcatcctcaacattggcaaaataacctctaaaaattactgagacacacctcaggaattttctttgatttacaaatgtttaccaaattcagatgctttgattcagcaaaacacaacagctaaaatcaaggatatcagaaaaatgttggatagctggccaggtgtggtggtgcgcacctgtaatcccagctactcgagaggctgaggcaggggaatcacttgaacccatcaggcggagtttgcagtgaccaagatcatgccattgcactccagcctgggcgacagaggaagacaccatctcaaaacaatgcaaaattcaaaataaaaaataaaataaaatgtactttttttggagacagagtcttgctttgttgcccaggttggagtgcagtggcacgatgacagctcactgcagcctcaacttcccaggctcaagtgatccgctcacctcagcctcccaactagctgggactacagacatccaccaccacaactggccaaatttgtattatttttttttttcttctgagacggagtgttgctctgtcacccaggctggagtgcaatggcgagatcttggctcactgcaacctctgcctccctggttcaagcgatcctcctgcctcagcctcctgagtagctgggattacaggtgtgtgccactatgcccagctaatttttttgtatttttagtagagatcaggtttcaccatgttggtcaggttggtcttgaactcctgacttcatggtatgcccacctctgcctcccaaagtgctgggattacatgcttgaaccaccgtgcccagccctatcttttgtatattttatagagacagggctttgtcatgttggccaggctggtctcatactcctggcctcaagtgatctgccctcctcagcctctcaaagagctgggattcaggcgtgagccaccagtccaggccaaaatacacttttgaagtaattttgaaatatacattattagtaactatcattcctaatgaataataatcttgctgtgcaatacatctcaaaaacccactcctcccatataactgaaatgttgtaccttttggtcaactcagagagacatattttactgaattttttaaatatcacaaagaggtcttaggaatcatttggcatcttatttctgtagatcttattcatagactcttagatcttattcatcagcctgctgatctgttcctttttcagaaatgcagatcatatccgacatttttctttttttgtttgcttgttttttgagacggagtcttgctctgtcgcccaggctgcagtgtagtggtgcgatcttggctcaccgcaagctccgcctctcgggttcacgccattctcctgcctcagcctcccgagtagctgggactacaggcgcccgccacaacacccgtctaatttttttgtatttttaatagagacggggtttcaccgtgttagccaggatggtcttgatctcctgacttcatgatccacccgcctcggcctcccaaagtgctgggattacaggcgtaagccaccgtgcctggccttctttttgctttttttgagatggagtgtagctctgttgtccaggctggagtgcagtggtgcaatctcagctcactgcaacctccacctcccaagtccaagcaattctcctgcctcagcctcctgagtagctggggactacaggtgcacaccgtcatgccccgataatttttatatttttagtagagatgggttttcaccatgttggccaggctggtctcaaactgctgacctcaggtgatcttcccgcctcagcctcccaaagtgctgggattacaagtgtaagccacagcacccagcaaaaagtagatttcaaatgttctcactacagaaaaatgatacacttgtgatgttattgatatgttaattagcttgatattatcattccagaatgtattcacagatcaaaacatcacactctgccccataaacatatacaattatgttcattaaaataaaaaaattaaaattttatcttaggaaaaaaattagtaagaagtcccagacttgtaatttcacctccttaaacctcaacttcttcacctataacagaaaaaggataactccattttcccgtcctttggagctgtaagactcccttagcagaggggctgtccacggggctgctattattattgccatcaagcagtgggaatcgagcggcaccccacacaccacaggttactttttttgtttttgtttgtgttttgagacaggctgtcactctgtcacccaggctggagtgcagtggttatccatgctcactgcagcctcaacctccttggctcaagcaatcctcccgcctcagcctctcaagtagctggactgcaggtgtgtaccaccatgccagaataatgaaaacaatttttttttatttttattttttgtagagataggggtctcactatgttgcccaggctggtcttgaactcctgggctcaagcaatctgcctgctttggcctcccagaatgttgagattacaggcgtgagccaccacgcctggccactgctgcagatcactttacccaagtatcactctacatgttctgggggtggggcccatgacactgtgcttatggaacaatgcggaggattggtttccagagagtcgcagtttgcctaaagcctgacagccaggactccatccagttcaggcccttgcgtgcaaatgcagtgatagcttctgtcgcggcagggagaagggagaggttctttctggtgagaaaaaataggagctggcatctgagccagccttagaaggatgacctggagaactggaggcggaacactgcagactctgaaacaggcctgggaaggtatttctggggcccaggagcaagtgtctaagtagatgtgcagtgagggatgaggagaagtacagaaaagtagtttgtgttttaaactgtggccaggcacggtggctcacacctgtaatcccagcactttgggaggccgaggcaggcagatcacttgaggtcaagagttcaagaccagcttggccaacacggtgaaaccatatgtaaaaatataaaaattagccaggcatggtggcacatgcccgtaatcccagctactcaggaggctgaggcgggagaatcgcttgaacccgggagatggaggttgcagtgagctgagatagtgccactacactccagcctgggcacaagagtgaaactccgtctcaaaaaaaaaaaaaaaaaaaaaaaaaaaaaaaaaaaaaaaaaaaaaaagatgatgacagggtctcaagtatgttgcccagtctggtcttgaactcctgggctcaagcaatctgccttggcctcccaaagtgctaggattacaggcatgagccaccttgcccagccccgtggttatctttgaatcctgggcatacaaactggaagtaagctcctaccagggaaaccacttggcatttagggcccagaaacaatcagttcttccaggttgactcctcctgcgaaagcacatggggccgtgtaatcatttgctcgtggtccacctgaaaatcctgcataacccttcctaaggcagtgccagccaatttaagctcagaaatgttccctctctaaattttcctcgcagcacctgaagctcccccagcccaaggaaaactggtgggtgacaggaaggagaagcatgacctccagtgcacactgagtcccagcagggccagctcacccaggagctgagcgggagggtctctctgccctgtagacactgggttcaggatcaggagctgagaccccagatcagacagacctagaccctggctcttcctcttagcagctgtgtgagtctccatctctccagttatagtgggaatgatatggggaaccatgtctccatcttattgtaaagatttataaaataacctatgtaaggtgcttgtggggagaaatggctcaaaggacagtgcctgctccaatgacgactacgactattgcttttttttttttttttttgagaaggagtcccgctctgtcacccaggctggagtgcagtggcgcatctccgctcactgcaagctccgcctcccaggttcacgccattctcctgcctcagcctcctgcatagctgggactacaggcacccgcccccacacctggctatttttttgtattttttttagtagagacggagtttcactgtgttagccaggatggtctcaatctcctgacctcctgatccgtcttcctcggcctcccaaagtgctgggattacaggcgtgagccaccacgcccagcagattattgcttttctaatccatgccacagatcttgacgttctgcctcctgcgcacacctcccagcaggcaacatcctcccatccagcagttggcactctaggcctgttctgagcccctaagactgggcaggtcccctgcacgccctacgcactctggctttctcctttctagcactttccaaaatcatgatgaattcattatttgggtggagtgctgccctccaggcaaggaatctcgtgacagcagggactgtgattatttcatttgttgccatagaactcgggcccagtgaagggcgtggtgtggcagggaatcaccgtgaatgctgtagaatgggtcgttcattcacctagccattcattcatttacgcagggctagaggaatttcactctccacctccgtcatttactttctgggtgatctagagcagcatccttcttctcttagcctcagttgcctcatctgtaaaatggggctagcactgccctcttagagtatggcaaggagtcattgagataatggggctatgacacagagatattttgagcacctggcatctagcgattgttcaatagccactggctgtagtaagagtcttatttggccaattgttattgttaatgggctccctgaaactacaacaggagtttgctctgtcctttcatgtcaaaatccactggactgacccacactaactgactactggaaaggtaaggaatggctgataaaagttctttctctttccttcttcacttcctcccttcctccctctcttccttcctttctttttttgagacagaattttactctgtcacccaggctagagtgcaatggtgtgatccagctcattgcaagctccgcctctcaggttcatcagttcttttgcttcagcctcctaagtagctgggattacaggcatttgccaccatacccagctaattttttgtatttagtagagacagggcttcaccatgttggtcaggctggtctcgaacttccgacctcaggtgatccacccacctcggcctcccaaagtgctgggattacaggcatgagccactgtgcccagccaagctaatatagtttttaaatgttttgtagaatcgcaaggacaaaaaaccaaacaccaccatgttctcactcgtagatgggaattgaacaatgagaacacatggacacaggaaggggaacatcacactctggggactgttgtggggtggggggagggggaagggatagcattaggagatatacctaatgctaaatgatgaattaatgggtgcagcacaccagcatggcacatgtatacatatgtaacaaacctgcacattatgcacatgtaccctaaaacttaaagtataataataataataaaaataaataaaataaaaataaaatgaaataaaacttcaaaaaaaaatgttttgtagagacaggggtcttgctatgttgcccaggctggccttgaaatcctggcctcaggcaatcctcccaaagtgctggcatttgtcatgagccaccgaatcattcattcattcattcatgcacagtgaatccacaaacgttttccaagtgccctccaggggccgggcccaggactaggtgctgtggttggaagcagaaaggagagtcctgggctgagaggaagccatcagtttatcctctgtgccaagggaagtggctgagccctctacccacatcctgtcacccccacccctgcactggctgatctgtctctgtccttttcctgaacctctttcatcctggcctgggcagggggctcggcacccccaccccaccgttcagccatttcctgcccttctgtcatctgcttcctttgatccttttgtcagaagactcttggaagcctctaagccattggcaaccccgtctgctgggctggggctggtgaccccacaggggctgggaccaaagtgggcttctcttgggatcctgctctgggaggcagatggattctggccacattcattcattcgctcattcactttttcattcgcaggttccaggctttgtgctgggcccagggaccacaaagtaagcaagagagccatcgtccctgccctcatggagctccagcccaagggacagcagcttatcctacgccaaggggctcctctcaaaattcccacagcagtagtgatctaaggacctgggcaggggcactggacttcaagtctcagcctctggtgagtgtctttactcccgagccccagttccatacgtgggtacttgcggaggggctggacttcacattccctaaggccttccaagctcaaagactgagaagatgcggtgtggccaggaccctcctagagtgagctccctggatgcaggaagggggccctgggcccagcagagaggcagggtgaggaggccagaggtgtggggagcccagtttgacaggagatggaatacacattattttaatttttttcttttttgtttaatactgttgatgcaacagtaagaatacacattgttgatcagaaagtgaacagagccttagccccaaatacaacaagcctcttctctttatcttgtatggggtctccacagccagctcaggacaggagttcagtcgatgctgggaaggggctagcatttattgagcacttactatgtgccagggatgctgggctgagctctttatgtcaggcatgaatccatggaatccctactctggtcctatgaagcagatagaatcattcttcccattttacagatgagaacagggaggcaaggagagatgaaggttgcccagggccccatagattgcaggtagcacagctgggttttgaaccctgtttgcctggcttcagcccacacactgttctgtcccctggtgactgaatggggggacctccaggcatcaggatgctgagctacacaaggtagcagacttgccctttctggggtctgcctcagtagttccagccgaatgtcggggtggttcaccccctttcccccagagagtggaaaacagtcagagaagagagcagaggcccatctgccacaggaagtccttcagaggactgcagtagggactcttagagtggcttcccctctgaccctccggggctcttgcagtcccagcaaggctggcaccagttccttcaagcccttttgggaatttccagtagctgagcttctcccagttcttagtatgatgaactcctatacagccctcaatgccctgctcaggtgcccctcaacctccctagaaggactcgatccctcctccctctggatgccctcctcttcatctgataccctttcctgtcccacactgcgactcgtactgtggaaacctgcaaatgtgtcctcattgttgatagcacagcactaccagcctcttccatccagcatttttcctgtgccaggccccatgccatgtgcgtgacaaccctcaccagcccctgggactgttcttacccccactttacagataagcaagttaagtcacaaaaacacttaggtgtcttatccagtgatccagggaagccaggcaccgtggctcacacctgtaatcccagcactttgggaggctgacaagagccgattgctttcgcctaggagtttgagacaagcctgggcaacatggcaaaaccccatctctatgaaaaatacaaaaattagctgggtgtgctggcacatgcctgtagtcccagctactgaggaggctgaggtaggagaatcacctgagcctggggaggtcaaggctgccatgaactgtgattgcgtcactgcactccagcctgggagacagagtgagaccccatctcacaaaaacaaaacaaaacacaaaactgcgacccagggaacaaccgcagggagtgcttgtcctgcccacgcctggatttttagccccttccttagtgtctaccttctggcctcctgggttttactgcctcacaacaggccctatatatatatatatacacacacatatatacatatatacatatacacacatatatatacatacatatatatacatatacatatatatttttttcttttttgagacggagtctcactctgtcacacaggctggagtgcagtgacgtgatctcacctcactgcagcctctgcctcctgggttcaagcgattctcctgcctcagcctcctgagtagctggcagtataggtgcacaccaccacgcccagctaatttttgtatttttagtagagacggggtttcaccacgttggccaggctggtttttgagctcctgacctccagtgatccacccacctcggcctcccaatgaataattgttgaataaataaatgattgaagagtcaattttctccaagttgcttctggctgacttgtcccgcccgagaccacacagctccccatggatttgggtcccactgggtggcagagtcaaaaagccctgcctcgcctcagcctggactcgcttgtgaccttggtcagagggagcaacatctctggatttcttttcttcttctgtgtaggagtccctgcccaaaccacatcatctctctcttgtgatgctcagaccaaggagcaagcaatggggtgggaggacctccagttcctggaaggagcagggggtgcttcacacacactgcggcgaggctgagaccacgttctcaggggaggagggtggctctgggcctcacgacctcacaccttccctgtaggtacccagctatgcatccccgcccaggtgcagcttgtgttggaaaagggtccctgccatccggaggccccagagccccgcccaccctactctggttgcagacccttcccgcatctttggcagcctcgccacccctgggcacagcaggagcaaccccagtgcctggggatgaagcacctactgtgcttcaggccttcctggagccccagctcattgactaacagtgacctcctggggcagtcctgtttttatccccacctggtgggtgggaaaacaggctcagaggggccaggtccccaagtgtcacagctcccaggagcatgacaaaaattgcatggggaaggaggaggatttgctaaatgcccattcctggcattcctgcccccccacccccaccccccatcggcagaatgaacctctgggctggcagggaaaccgcagttttcctcaggtgcactctgctccggggagtttcatgtaacctgtcgtccatggaggcacagagaagaaagggccagggccagggccccacagcaggaaagggccagggctaggaccttggcctccaggctggcggacttggcacatctcaacagccagcgactctgtccccatgccaggatctgtcccctggcttcctcctccttacccatggggaaggacgcatggctggactcaggcagtctagacgcgtgtgcacatgtgcacacaaactagacacagtgtcacaccggtgcacactgtccacacgcacacgcacaggtacactgtgcacacacacactagacacagtgtcacgccggtgcacactgtccacacgcacacaaacaggtacactgtgtgtgatggtacaccatccattcattttatttctattctgagccttgctctacaccttttggttctgaaacatatgcttctgtgagctggctgctgatgctgtccctgtggaagtcaccaactcccacccctggcttagcacaccagttctgacaggtcccaccaaggctgcaactcccacataaggagttcagctcccctcttcccgcctcacctccacttgggtgggaattggactctgggttcttttccttcctttcccgagtcacttcacttctccacctgggtatttcagtcccgagagaggcctcaaaaatgtggaaaaacaagccactagcccactctcagagcctcaccaacctgcaaagggacatcgattatcagggcacaggggagaatgccatgggcatctgagccagtcctgggaccaggcactagcaggacaagctgggctggaactgggcggcctccgcatctgcttccggcctgctgtgtggccctggacaacggagaagtaagaataatcgcccctgtccttctgagggttggaagggaaaacatggaggctttagacaaggtgacagcccttcaacccttcagtgacagggaatagaaagccctgggtggggagagggaagtgggggaggagaaggaaggtggaggggagagggaagggaggggagaagaggaagggactgacttccttgagtacctactatgtatctgcaaggtagcaggtgttcccatctcttcatctcactggattccccaacaactctacgcagctggtattctctcccctagcacacatgtttcactgatgggaaagccgaggctcagagacggccagcaacttctccaaggtcacacagctttcacatgctagatctgggacaccagcccaggcaccttggtctgactccagagtttggcacctttgcccatgtccctaccctgagcatctccccctgaaggtgacggcagggcagaaagcgccgtcagcactcgcctcttaggcagctttggaggttcatgcagccattcagttaacaaatacttatccactccctctctgggttaggcccctcccctccttcttggggctccctggtgggggctgctgtagggactgatctcagctggcaaagccctgcttcacccaggctcaaaaaatagtcctgctgctgtccagcctgaagagtgggggccacaggctcccagaaccaaggctggggaggcaggaggcagagctgtgagctcggagcaggctccattagcatggggctccagcctcctagcttaaagatcgcctcgggtgctctcttaaagaggttaacgttgcagctgacaattgggagatctggcagctgatcaaatcggctctgaagatcctggcagctgaaaatgggagctgctgggtgggtgggtggggtgggcaccaggcagcagagacccgcactggctgggccgactggggcccaaggcagcagggctcaggtggctggttgctggctacggctgtgccttcagtctggcccaagccatctgggtatcctgtgctttgctggaaagacatgggaggaggagaaggaggaggcagaaggcgagaaaggaagcaggaagaaaatggacttgtagagacttgaacttctttcatccccaaacaccaggttctcgccagtaatcagaccagttggcaaaaaggcacccacaggtgaagagttgtgggacaggggtaagatggagggaggttcctggtgccagttacatctctgcagtgcccagtgggtccctttcagtgtagggtgtactctgaggaagctgagaggtctgaggaggagtcaggagaggaagattcctactcattccgcccatccacattgcggggaatgtagagatagggcacacctcggcctgcctgagccaaccttgtctcctttccatgcatccaccctgccacccaccacctccacccaccacctccacccaccacctccacccaccgcctccaccacccgccacctccactcaccacctccacccaccacctctgccacccgccacccgccacctccaccacccgccatctccacccaccacctccacctccacccgccatctccacccgccacctccaccacccaccatttctaacacccaccacctccatccactgcctccacctccgccacccactgcctctgccacccaccgcctccaccacccaccacctgccctttcctctgtccagcccactcctcccctgcccttccacctgcccaacctgcctgtgtgcccttccatccatcatctgcctgtctatctagatctccagtcaccccccgtctattcattcattaattcatccattcaccttgcatccccatccctccatctcccatcctccatcccccatccccctatccctatcccccatccctccatcccccatctctcatcccccatccttccataccctgatccctccatccctctatctcccatccccctccccctccttccatcccccatccctccatcctcccatcccccacccctccatcctctcatcccccatccctccattccctatcttcccatcccccatccctccatctgccatcctctaattcctccatcccccatcccccatttctccatcccccatctcccatcccttcatcttcccatccccatccctccatcccccatcctccattccccatccctccatctttcaatcccccatctttcaatcccccatccctccatctgccattcctccatcctcccacccctccattcgccatcccccatctcatcatcccccatccctccatactccatccctccatcccttcatctcccatccctccatcccccatccctccactccatccctcaatccctctatcctctatctcccctccttcacccctccacccctccatcccctgtccctccatcctccatccctccctccttccatccctgtccctccatcccctgtccctccatcctccatccctccctccttccatccctgtccctccaccctccatccccaatccctccatcccccatcctcccatcccccatccctccatccaccattcccatccctctatccctccaccatccccatccctccatccctccatccctccatcccccatccctccatccattcatccttccatccaaagaacatttcttcagcataggagaggtgcacccagcccagtttcggggctaggaaaggcttctaggaggaagaaacctacactgagacaggagaatgagttggagacacctgggctagcggggaagggaaggtattcccaacagaggacaagaggcaagaggcctcttgaggaccatccagtcacattctggcagtcacttcagagggggaggcccaccagagcacaggagaagctactgaggctggagtgggcagcaaggtcaggctgtggagctgggacaacctgcccggcacagagcagggccacgcgaagagggaacgtggaaggtacggaagccaggtccttgtcctccagctgtttaccactgacccttccaaataggcctgtcacccacatccctccaggctccctaatcctttgaactcccaatatgctcatagttaaagcctacagttccacccctgcaggcttttttgttgctgtgtgtggattccagctttgggcagggctgtgccttatccttcttggtgtcctgctccatggactcggccagatacccccaaatattcaagagatgaaaaaatacaggtggccaggcacagtaactcatctctgtaacctcagcactttgggaggctaaggtgggaggatttcttgaggccaggagtttgagacaagcctgggaaacaaagtgagaacctgtctctccataaaaacaaaccaacaaacaaaaacatacaaaaaatatgaaacctccccgtaaaacttcctcctcctcttcttcctcttggggctcctgggtgtcggcgttagccccttcctgtctccccaacaccccaccatatccagtcagcaggacctaacgattctgcccgcagcacacctggactctccactatcctcgccctacctggtcaccaacatgggtgggcatggcagccgccttctcactgcccttcctgcctccaggccacacacacagtgcagtcagaggggtcttcctaacacataagctgggccctgccactctccactgtcatgcttcctgctgccctctggataaagtcctgaatccccgccacggcctgaatggcccttcccaggccagcccatctccacttctctgggctccaggttcatcgctctaagacacgagggccatcaagttcattgctgtccacactgcatcgctgaatccacagtcctggctccagcccctgggccatcttggctaatagcctagaagagtcccaagtcttcaactgcctggtcagacccccatatcatcccatcccggtgagcccgggaccaagtccacgtcacccacaccacgtccaacacctgattggccctcaggcaaaagaaaatcttgctttggctgcctgaatattagagtttaccccccaggccctccctccctgggtctgactgctctcatttgctatttgtgccttaaaccagagccaactgcttggcctcttctctgcctacaaaacatttttaccgatttatggctgcaaaaatttccttcctgtcctcagattcacaggagagagccctggccctgactcagaattggattctagctggaggcgtcctctccgtgctggctccagagaaagggtttatctgtttgttccttgaccttgagcagccgttgaggcagccagagagaggagaggcagaagctgggaggagagcgaggagcaaccctggggaccctgccctctgccccaagggacccgcgagccaggtgataggaaataagtcagagggaggaggcagctgtgctgtgtgcagggccagggccacggaggcccagggggacgtgaagcagcacctctctgctgtggctctgccagtccggaggctgcaccctgcctttctccacccctggtccccgccggaaactggacagagagctggaaggagacatcagccatccaggcaggagctgaccctgccagccattctggggcaactgtggctgtcacagaccctgacccagtggagggaatagacccaggcagcctgaccttgtccactgtttatttttgccaaaataatctcattcttattacataagtaatgtatgcctattgtagatattgtagaaaatatagatgaatccaatgaagaaaatacaaccactcattctttttttttttttagagatggggcttttccatgatgcccaggctggtctcgaactcctggcctcaagcaatccacccacctcagcctcccaaagtgttgggattacaggcgtgagccaccgcacctggcctaatacagtcactctttttttctttgagacggagtcttgctctgtcacccaggctggagtgcagtggcatgatctcggctcactgcaagctccgcctcccatgttcaccccattctcctgcctcagcctcctgagtagctgggactacaggcgcccaccaccatgcccggctaattttttttgtatttttagtagagacggggtttcaccatgttagccaggatggtctagatctcctgacctggtgatctgcccccctcggcctcccaaagtgctgggattacaggtgtgagccacctcacctggccaatacaatcactcttaatcccatccctcgtcaatgatcctctttggctgaccccctttgatatttggaggagttgggtctcctctcagtcctctgtatctggcattcacttctagccctgcacacagtggacatggaaggatgactttatggctgatcccttatctgttttttcattcttcactaaccccaggagtattcattgaaccctcaggaggtcacaagttagtagtgttttaaattctttgggaatagactggatgcagtggctcacatctgtaattccaacactttgggagattgaggcgggtggatcacttgagcccaggagtttgagaccaacctgagcaacaaggtgagaccttgtctctactaacaatacaaaaaaattagctgggtgtggtgatgtgcgcctctactcaggagtacacagctactcaggaggctgaggtgggaggattgcctgaacttgggaagtcgaggctgcagtgaagcgaggtcatgccattgcactccagcctgggagagagtaagaccctatctcaaaagaacaaaacaaacaaacaaaaaataggccaggctctgtgtctcacgcctgtaatcccagcattttgggaggccaaggtgagcagatcacctgaggccaggagttcaagaccagcctggccaacatggcgaaaccccatctttactaaaaatacaaaaatgagccgggtgtggtggcactcacctgtaatcccaggtactcaggaggctgaggcaggaggatcacttgaacctgggaggcagaggttgcagtgagctgatattgtgccactgtactccagcctgagcaacagagtgagattctgtctcaaaaaaaaaaaaatagaaaaaaaaggctgggtgcaatggctcacgcctgtaatcctagcactttggaaggccaaggcgggtggatcacgaggtcaggagatcgagaccattctggctaacacagtgaaaccccgtctctactaaaaatacaaaaaaaaaaaaaaaaaatagccggggcgtggtggcaggtgcctgtagtcccagctactcgggaggctgaggcaaaagaatggtgtgaacctgggaggccgagcttccagtgagcggagatcgtaccactgcactccagcctgggcgacacagcgagactctgtctcaaaaaaataaataaataaataaataaaaagtaataaaataagcataagtaacttacttgggagtggaaagagatgtgtggaaacccagattggtgccggtgtaacccagataaaagctgggcttccacatagctccgtctctgcctcctgggacctgataatccaacagtcacaagtaatttaaactaactttctgaatgtccttgtgactcccaaagaacctcaaaggggcctaattcaaaccccacagcaatagttctcaccagggcccgtttccttgctccggttctctccgtagacaagctgttgttttgcacatgcccaaggctcccgaacagtcctgacagcagcctgcgtcctctcgcttttccctcggatatttgttatgtaatctacacagtgggcagacccttccccaccccaccttatgatccatgcccctctggtgagtggttcagagcccatgctctggagcgagaccctctgggtccaaatcctggccccaccagtcacactctgtgacttgaccccagtgcgtggtccaaggacccgtgctgggccacacactgtttgtaacatgacacgcttagaactgagaataagcatttagtaactttcatagcaacttgacactgcctacatcccattgtgaccgtgtgtattataaaaatatcattcctgacagattggaacatgttttctcgaagttccttcatcgcagatagtttggaaggcgtggactcagcctactgtgtgcctcagttttttcattagtgaaatgggaataatgatggtctctaacctcaccacatccctgaggaggtgtaaaggcgtgaaattaggaagggctctgagactgggggctggtcactgcaatctctcagtaaatgtcagtgtcactatcattttgacacattctccagattctgcattacaagcatcagattctcctctgaggacagaggagggagagttggggagagagtggaccccattcagtgtatccttccccaccccaagttcatatggcttttagccaaaccttgagattggaacacctctgtcactgcatccaaaacctttcaggtttccaaagggtagtttattcgtccacttaacaaatatctagggccagcaccatggcttacgcctgtaatcccagcactttgggaggccaaggtgggcaggtcgattaagcccagcagtttgagaccagcctaggcaagatgacaaaagctcatcgatacaaaaaaatgcaaaaatggccgggcgcagtggctcacacctgtaatcccagcactttgggatgctgaggcaggcagatcacccgagggtcagaagttcaagaccaccctgaccaatatggagaaaccctgtctctactaaaaatacaaaattagatgggcatggtggcacatgcctataatcccagctactcgggaggctgaggcaggagaattgcttgaagctgggaggtaaaggttgcggtaagccaagatagtgccattgcactccagcctggaaaacaagagcaaaactccatctcaaaaaaaaaaaaaaaaaaagcaaaaattagccgggtgtggtagcatgcacctgtggtcccagctactcgggaggctgaggtgggaggatcagctgagcccagggaggtcaaggctgcagcgtaccatgattgtgccacggcactccagcctggatgacagagagagaccctgtctcaaaataaagtaaaatgaaataaaactaaactaaactaaactaaacatctgtagctcacgatgagagctggagagtccagtggttaagaactttagagcaagatggccccggggtccagtcttgccctacctgaatgaccttgggcaactcacttaacctctctgagccacaatgttcccagaagatagccaggaggagtcctaagctcaggactcagttcagggctgagatttggccgacaatgtgcacacacctgcagaaagcccggccaccccaggcactcactacatccaggttcggatttgcaggctgtggtgacctcccaggctccccaccctcagtgagttcttgtggattaagaaggaatgggtggcgccttgagataccagacttgccaggtgttacttctagaaaaataaatgaatttaagggctttgaatatttgagaatggagagatttaaaaatataaaggtttctgctgggcgcggtggctcacacctgtaatcccagcactttgggaggctgaggtgggcggttcacgaggtcaggagatcgagaccatcctggctaacacggtgaaaccctgtctctactaaaaatacaaaaagttagctgggcgtggtggcgggcgcctacagtcccagctactcgggaggctgaggcaggagaatggtgtgaacccgggaggcggagcttgcagtgaaccgagatcacgccacgccactgcagtccggcctgggcgacagagtgagactccatctcaaaaaaaaaaaaaaaaaaaaaaaaaaaaaaaaaaaaatatatatatatatatatatatatatatacacacacacacacacatatatatatacatatatatacacatatacacatatatacacacatatatacacatatacacatatatacacatatatacatatatatacacatatatacatatatacagatatatatatataaaggtttcttaagatggatagaagtcttaccaattggatttgtattctgtggaacagggaggcttatctaaggtctctctctagaaaacacagctctgttcaaagggaaaagcaggctggccaacccacgtgatggctcttgaagcttctcttttgaatggcctgctaggacttgggctccggattcactggctaaagcaagtcacatggccaaacctgatttggtggggaggggaggtgtacccagcactggaggccctgcacgtcgtgtagcaatggggcaggatgaatagtcctctcactgggaggacagtgaataactggaaacagtgaccaatctgctaccatgcaccatcttggttgcaattatcactcctgtctcttgcgtgggcatggtggattggaggcggctgcggattcttagtcattcctcccagaaagacatggagtatttttctcctccccttggatctgggctgattccaggactggctttcatcaacaggatgtagcagaagcgacgctgtgtgagttcccaggctgaggctgcagagatttgaggcatcttctctcacccagcttgaagtccttccccttggaagccagtcaccgtgaaaaaactcaccatgctgtgaggaagcccaagagagctgcatggagagaagggcctgtggaagagctctgaggtgccactcacatgaagtgagcctttgtggaccttccagcccagccaccagcaaacacaacccagtaagtgtccccagtcaatgcttctctccataggagacctgtaaatgggcggtggggggaggaattttctggtctcacacactattatgggttgaattttccccctcccaaattcttgtgttgaagctcccacctccagtactttacaaagtaacatatttggagataagatcttttttttttttttttttgagacggagtcttgctgtgtcactcaggctggagtgccatggtgcaatctcggctcactgcaacctctgcttcccaggctcaaatgatatcttctcgcctccatcattcattcattcactcactcactcattcaacaaacaaacaatgggcacctacccaccacgggccaggcctgcctgggttctggggttcaactgtgagtgcacaaacacactaacagcccttggaggactcacagtccagggagggaggcagacagtgaagacagtgaaacatcgagccggttcattgccactgccatccgaccctgaaggagaagtgcaggatacgtgtgagagtggaacagggccctgagctccacccgggagtcagggcagcctcccctgagaccattatgttgaaggctgacctgaaggatgagtagggttatctgtggggctccagcaaaacacggcatctctctgggcctcagtttccccattggtaaaatggggaaactcatcacagcacaagtgcttaggggaccttggtgattctgtcggatctaagaaaagcaacaggtgccgggtgcggtgtctcacgcctgtaatcctagcactttgggaggccgaggtgggtggatcacctgaggtcagtaagtagctcaagaccagcctggccaacatggtgaaaccccatctctactaaaaacacaaaaattagccaggcgtggtggctcatgcctgtagtcccagctactcaggaggctgaggcaggagaatcacttgaacccgggaggcagaggtagtagtgagccgagatcatgccactgcaccccatcctgggccacagagcaagactccatctcaaaaaaaagaaagaaagaaaaacaatgggagcctttaggaaatcccgcacaggtactgatttgctctgttaattcctccaatgggaaaggggtgttgctagaggcaagaggcacagtcctgacacagagatcagggatttgaccccaccaggccaaagtcaaaagcagagatcagtgaagtcagatcccacagaggcctgtggccatgtcccccggccctctgcaggtcccctggcccagagccctctcctcctgctgccccctaatgtttctccaggccctgctgctctgtcccgtcactctgtccacctcatctgtggtgcctgaaggtcccctcttgggctgtgggtgtcattcttgtctgatcaccgcctcccccaccacacacaccgccaaccccaaatacaggtttggcttccacaaagcctcttattaagaaattggtcaatttcctgctaattaaaataaatagtatgccacattaacggccagttaattttcagagctgccagggaaacatcgcctggaaaatgtacacccctctgccccacccgctcctcggcaaacggcagccacgtggcacccagcagcagcggggagggcccggtgggtcccaagcttccagcagcatggggaggaagggatgaccagctgtggacagggctgcagatgggcagagcttcctgttcctggggggactcgactcactcagcccaggagctctgagaccccatccctccccaggaaacccaggccctgaggccaggtctacctggcttaccttgcaaccaaaggcgagatctttctccggaaccgggtcatttgttggtgaggaagatggacttctgggaggcctgcgctcacaaggctctacatcccgaagtgatctcaccaaggggcacaacagcctggagagggaagtgccattgctcccattttgcagatgggcaagatgaggcccagagccaccaagcccctctcgagttgcagcttctgggggcagagcaggatgtacatctggtcccgcctaactatacccagagaaacctgccgtgggcccttctccatcacacatggtcatcccacactatcacaaaggtcaggggaaccgctatgtctgcataaaaacaagtgtcatcagttggatttgttcaaggtgaggcttacctgctccctaatatatcgaaagctcctgttgaaggagagtcagggacatgccaggaggcctgccatgctgtgaccagttgtcatctcaccgaatcctcaccagtaccacgtggctcagcaaggttaggtaacatactcaaagtcacaccgcctgcccccaaattagtcatggcaatctcctgtcttcaaggtccaagttttgctgtttcctcagggtcaaaaccaaggtcttctcctgtcctggaagaacatcaagccatagatggaactctgcgttcctggtgtgacctcagacaaggctctttgcctccctgggcctcagttttctcatctgccaaatgggaaggctggactcactactccctcagactctgtttaactcgagcattctgcagggactcatcctggggcaggtggggtcagagggcagatggccaggagcagagccagatgggagcaacagccttccctctgccaggacagggagagacctggctgcctcacagtgagaggtctggcagccagggagggcactggggacaagggcccagccgggcaccctatggagcacatgacccccacctgtccatggagcacacgacctccacctccagctgcccctgtgctgcagacaactcccagggtggcgagggtggcatcctgatcccagcagcgcctgcaggactgggaacctgctgcccacccaccccctgccacttgctctcccttccttgcccaaccccaggagctcaatgcctgctcagggcaggaataagaggcagaggaggggtgaggagagaaaggagtcattaggggccttgctgatccttcgtggcgcctccatgtccctatccctcatgcaaagcactaacctggaggcggagcatttcatcgaagcaaagcatctcctgccaccaagcacgtccacggtattggggattgattgcttctatcctccagcccactctacggagcacccaccgtgtgacaggcgcggcgctgggcaacgaggataagaaaatgaataggccacgacatgtgcgcctgagaagtcacagactcagacaggagacaggctcgataccacacaccaaggtctggatgcacacaggacactgagtaactcctgcagggtgagcgggtttccagggcactcgacaaccggcagagtctggaagcagcctggaggggaaagggcattcctgacgggggcacagcagaagcaaaggcccagtggcatgaaagaccaaggagtgttgagggaacagagagcagcttggtgttggggcggcatcagcgggtggagctggagccgatgagaaaggataggccaactagggttcaagtggccaagaccttctatgccctgctctgccagttacagccagcagtggtggtaagcacagccacccggcactgaacaatggcagtgtggccggcactgtgctaagctcatctcagtcactcgctcaccacatcctccaacgagcccatgaggcccagagaggttaggcgagttactggtggtcacacagccgatagtggccaggctggaacttggactcaggctcccaattctcacccaccagcatgtgctgcctctgaggagtttggggttccccttcaggacaactgggagtcacaagggatttttaaggggggtgggtagcagagtctcagtgccctaaatccccaagtcatgctcatggagaaactgctgcatccacctgggagacgtggccagtctgtttttagggtctgagggtcaccttggcctctccgggagctgccctggtttccccaatgctcctgagtactggggcttggcctgcgtcttctgccccagcctgctgctcctgggttccagtcttggagccaggggtcatcactgccagggcctcttcagaactcaggcgcccacctatcagggcctcagcccctccaacactccctggggcccccacattgcccaccctctcttccctctgcccttccttgctcgagataacacctgggatgggggtgcatggggaagcgccccctgatggagctagacagccctcgggagggagttagacagccctcgggaagatccagcagtggtggcctctccttgcccttccccatgtcctccctctcccctctgcccacccagcctcccaccacatggggcactggagtgctccttcccaccatctgccctcctgggctccgctttcattctgctcccccgaccccaggtctcagcattgcaggcatcacaagacagcggattccagaggccccaaaacacttccatcctccaagcacgcactgagcatatggagaagctgaggcccaagcagggccaatggcagagcagctggaagcccagctctcttgtgctcttgctgcagctccagctcctggtcggccgtccaccaggcatctgctgagcgcgatgtgtttccatttaggggcatctcacacttgatcctcactccagcccagaggaggctgggttaaaacaggaaggctgggctgtccagctctagctccttctaaaaatgcagtgagtcccatgttggcatctctgcttcgcaaacaggtaaaacgaggcaagcagtaggtcaatgacttgctgtctctggtcgtgtgtcaggcaaccacagtcacacagtcacgagggtctcctgtctgagatcctgcctattcttttttttttgagacggagtcttgctctgtctcccaggctggagtgcagtggtgcgatcttggctcactgcaagctccgcctcccgggttcacaccattctcctgcctcagcctccccagcagctgggactacgggcacctgcaaccacgcctggctaatttttttgtatttttagtagacacggggtttcactgtgttagccaggaaggtctcgatctcctgacctcgtgatccacctgcctcagcctcccaaagcgctgggattacaggcgtgagccactgcgcccggccaatcctgcctattctttagtgttaaggccaggaaatgccttagtgtagactcctctccctgtgaatgtggcagacattactaattgatcacagcactctttccctctaagccgagatgtagtctcagaatcctcaacacagcctctattaaatggggacctggcaatcgaggtgacacctacctgttcaacgccctctctggagggcaggatcctgtcttacctagtatcttccccagcacttggctcagggcccaacacgtggcacagatcacggtaataaattttttttttttttgagttggagtgttgctctatcgcccaggctgcagtgcagtggtgcgatctcggctcactgcaagctccgcctcctgggttcacgccattctcctgcctcagcctcccaaatagctgggactacaggcacccgccaccatgcctggctaagtttttgtatttttagtagagatggggtttcaccgtcttagccgggatggtttcgatctgctgacctcatgatccacccgcctcggcctcccaaagtgctgggattacaggcgtgagccaccttacctggccatttttttttttttttttgagacagagttttgctctggttgctcaggctggagtgcaatggcacaatctcagctcactgcaacctcggcttccagggttcaagcgattctcctgcctcagcctcccaaatagctgggattacaggtgcccgccaccatgcctggctaatttttgtatttttagtagaaacagggtttcaccatgttggccaggctggtctcgaactcctgacctcaggtgatccgcccgcctcggcctcccaaggtgctgagattacaggtgtgagccaccatgcccagccacagtaataaatttttattgagtgagtgggtgaacgagtggtaaccaccgaatgaacgatgcctcccaaagccagtggctctaaccagcttcttttgtagcaacaatatgacagcaataattataacagtaatgcccccaacagctgacatttcccgagtctctaaggtatttcatctgagctctggaatgccatttcctcagggtcacacatcacaggacagagccagaccccgcccctggcctcttgcttctgagtccagtgctctgccccggcccccacctctgccaggtcccaccgcagcttgtctgggtcaattggagcggacctggacctcaatctggggaacctgcaggtgttggaggcagatcccagaggccggggtgggaatgggtgctcgggggagtagttagttgggttcttactcacctgtttgggattgtagaaatacagaataggagacatcacaatgcaccacatttaccatgacctgacccccctccccccaaaattcgtatgtcaagacataatctgcgtcaagcttggtggctcatgcctgtaatcccagcaccttgggaggctgaggcgggtggatcacctgaggtcaggagttccagaccagcctggccaacatggtgaaaccccgtctctacaaaaaatgcaaaaattagccaggtgtggtggcacatacctgtaatctcagctactcgggaagctgaggagggaggattgcttgaacctgggaggccgagactgtagtgagtcaagatgaggtcactgcactgcagcctgggtgacagagggagaccctgtctcaaaacaaacaaacaaaaaccaaaccaaaccaaaccaaaacaaaaaaacaccattatctgcaatgtgtattaaaaggtgaggattctggcctggggcaatggctcacgcctgtaatcccagcactttgggaggccgaagtgggtggatcacgaggtcaggagatcaagaccatcctggctaacacggtgaaaccccatctctactaaaaatacaaaaaattagccaggcatggtgggggggcgcctgtagtcccagctactggggaggctgaggcaggagaatggtgtgaacccgggaggtggagcttgcagtgagctgagatcgcgccactgcactccagcctgggcaacagagtgagactccgtctcaaaaaaaaaaaaaaaaaaaagaggtgaggcttctgggaggtgattaggtcatgagggctctatcctcatgaatggaattcatgctcttaggcaagaggcctggggagcctgctcaccccttccaccacgtgaggacaaggctataaggcatctatgaggaaacggccctcatcagacaccgaatctgcaggcacattcatcttggatttcccagcctccagaactgtgaacaataaatttgtttataaataacccagtctaaggtattttgtcataacagccgaatggacaagcacacccttttttgaatatgtagaagagaggtccccagggagtgtgatcggcccaaggtcacctggcggccttggctgaggaaggtgtgcagagcccagtgtcagagcccctgagatgccctctcctctcctagggccctgggcacttggggttagttgttttgcatccttttgagaatgtgagtccctcagagggaggaacctgggcacgtcacataaggcttggctcaagataggtgctcagtaaacactggatggacagatgggcagaaggaaggagagaatgaaaggaggaaaggagggaaggaatgggtagctgagtggattcatggatgggtggatgcatggcagcacgggagggaggatgagtgattgggaggatggatggatggatggatggatggatggatggatgaaaggaagtaagccaacatggatggaatgagtgatggaattgattgtcccctgcacctggaggcttccagtgactcagccacagaggtcaggaagctggagacatgagcaggcggctcaccccatggtcccctccccctccccacctgatattttcatcaggacacatcttctgcaccaggcccctcagctcctgccctgcaaagctgcagatgcctctgctggctttattaaggccctattagcccagcagccccagggaaggctaaagatgctgtcactgcagacactggtttggtagcctcagaggagctcagtagggagggccaggaacctaaggttacagcgaggtctttagagctgcacaggcctgcctggtttaatcccagttcttctgctaattggctgtgtggccttgggcaacttacttcccttctcggagtggcggcttctccacctataaaacagggtcattaacgtgcttgtttgaggatttgctgagctaaagcatttacaacacctagcccaaagtaagcacttgttacatatcccaggatccctgggagccaggtccacggtggagcgctcatacacagcagcccccatctttgggatcagggaggcgctgtgacccaccctatttcatggatgaggaaacaggataacaggagatgaaatgcttggccaaagccaccgtgctgggcagtgacagggctgagattcaaacatgggctatggagaccgtgactgggccacttcctgttccggctactgagcaggaacaaagcctgggacgggagcggggggctggaggggcgcttctcccactagctcctcagaggtgacagcgcggaggaggggaggagaagggaagctgggacaatcacgctgatgtacggcttccagcgggattaactgcaccatctggaggccacgcgtccacctgggtgggttaggaaccccaacccttcggtgtaaacggcagggggagactcagtggatggcagatcggctgggggctgccgggttgactgtggggaccatgtggggcccacctggctttcctgaagcccccatctacccctgaggatgtctcccactgagggggctggatctccaccagactcagaagattccacaatggctggatccaagggttcaaatacaaagggagggctgtggcctgagccaccaaaaagtacaggaggtgagcaggaagagcgggggaacaacagagacaggagcagcagctggacactcgctctcaggggtgtgtgatggagactgcaccaccttccagctgtgtgtccccagcatgtggcttcacttctctgaggctctgtcccttcatctgtgaaactgggatcatcatggtctttacctcacttggttgctttgagggtcgaattagataaggcaatgtacaggcctcggtggagtgcctggcactgagtaagttcacagtcagtggtggttgtgattattatccccatttgcaagatgggaagactgaggctcaaagcagctcagggacttgtgtcggattacacagttggttggtgacagaacccatggcctctgcttctcctgaccccagtccagtgctcttttcctggaggcttgaccaaagatgaacctgtcctgggacacagccagccccggagtgtcagagacccaaggtggccatcttgggtcacaccagctccaatgacagattccatgttctagcacctactgtgcaccagatgccatgccacgagcttctgtgcaccaccgccaggagccatcaccatctgtgacaggggcactgcgctgtccccgtcgtccagatgcacaagcagtggttttggcagagccaggatccactgccaggcctctctggtcctggagtccccattctcagcacaggctgctgcccgctgggccaagatggggcttctctacactgcagcaacagctcccaggcgccctcccaccaagtgttcatcttctccttcaaggagagatggcaatacaacacccagactgccactgtggaccctaagtctttcttttttttgagatggagtttcactcttgttgccgaggttggagtttcactcttgttgccgaggttggagtgcaatggcgtgatctcggctcactgcaacctccgcctcccaggttcaagcgattctcctgcctcagcctcccgagtagctgggactataggtgcccgccaccccgcaacccggctaagttttcgtattttttagtagagacggggtttcaccgtgttagccaggatggtctcgatatcctgacctcgtgatctgccctcctcggcctcccaaagtgctgggattacaggcttgagccaccacacccggcccatggaccctaagtcttctggacaccagacaagcttcccctacagggcggggttcctttctcacatctagaaagaaggagggagtaggaaagaagaaacatcagccccagcccctccctcccttcagccagcacagggccgcagtgggggcccaggctggtaggcaatgatggcagggaggtagtttgaagcaggggggtcccctttccccgcacaccctccctacattcccatctggtcagcctgctcgctgaaagttgaagtctgccttgtacaaaaaaacaaaaacctccctttccagtgtagaaagccccagagacccgagccactctgcttgccttctctcttggcccttatggccaggacaggggccggggaaatgacagctgccctgtgcaggggagagaaatcgtattctttggcttggctcctctctggggccataccccaggagcagcccacggagccggtccccactgactcccaccagccactgccgggagtagggccagatggggcggctccggatcccgcctcgctcggcaggccaggcccggagacctgtccccctggtacctcccggcctggccatccgagatgacccttgccccttccccacagcccagacctctgatccttattaaaaacaaacaaaatctagagaaaaaaattatccacaaacagcctgagagatgatcgcgcgtccccggcgcacgcagacacgcacacatacacacacgcacacccacgcgaggtcgcctccacttaaacatgctgctggagggcgggttttgtttatggaacatccacgtttctctcaactttgggaggggtgaggactgtttcagagttttctgctagatgggggagcctggggcggcaaggatgtcttttctgctttgtgctctttgccggttcaatgggggagtgagatacgtggacagaaggaccaggaaacccaggaagggggccccagggcagcacccccacccccaggggaggtcaggctccgggagggcagccccggggcctgggaagcctggactgcgcctgagctccggaggatagggctggtggcccgcgtcccctcggcgaccccgcgctgagcccagggtctgtagttccgaaaacgtctgggaccgctgggccgggatccctaccccctcctctcccagccttcaacgcctggaaaccaacgaacccgcccggaacaaaggcaggccggctttccaaaggcaaacaaagaacagtttgtcttttccctccccccaccaccacccgagcaggcggcgggaataggcctaggggtccggatggccccggcgcggcgcggcgccagggcactcccacggcgccccccaaggtcccgctgcgaatgcgcaggtcggggcgccggaggccgcggcagacagcgcggcgccactccggcccggtctccgtggcaacgggctggtgggaggggccgggcggtgcgggcgccttggccgctgttcctcgcgggcacgtcgctatggcaacgatgttactctctgcggccgctttccggctccgctagctcgcctgaccctggccgctcgagccccctcgtctctcacttgctgtgttttcccctcttttcccgggcgtcctccgcctgtatcctgggccccccaagcagcgagccccggtgccccccacccttacccctcctccccggtgcccagggcccgggagggagattgatggggtgtgcttattaaaaaacattgtaaccgccgggcgcggtggctcacgcctgtcatcccagcactctgggaggccgaggcgggtggattacaaggtcaggaaatccagaccatcctggctaacacagtgaaacccggcctctactaaaaatacaaaaattagccgggcatggtggcgggcgcctgtagtcccagctactcgggaggctgaggcaggagaatggtgtgaaccctggaggcagagcttgcagtgagccgagatcgcgccactgcactccagcctgggcgacagagtgagactccatctcaaaaaaaaaaaagaaaaaacaaaaaacaaaaaaaagaaaaagaaacattgtaaccgtttctgtttctattacgttgacaagggagcgttatttactgttactgtttgcccagcaggctgtgccgggcgcgggggtctcccccgggagctcaccttcaggccgcggagggcgggggccgggctggggcgcgggcagggggcgtcgggcgaccgtgcaccccggggccctgctcctcgccccttcccccaccagcccggccgggccccgcggctgggtgcgttgccgcggggagggacctgcagaggaccagtgactctcccgttgtaggagaaaggcaacaaaaaataaaaacggcacagatgacttcattctcgggaaggctcggtcctacatggaccaatttcctggggaccgtggtggaacagcttcgctgccgttggaagcacttaaaactgaaccagataaagaccaggacattctgggccctgctgaaccaagccagggcaggctgcggggcgtgtgatttctggccaggtggggaggcgggtggcctccctccaccctcaaaggcgcctggctttcagtgtcccaggatgcgggggcttgtggggaggtctccactgggatcagatgggcctgaaggacgccccccaccctcaagcccctgctgggatgttaatctcatcctgctaattaaagtttgtgattctctccctaacttagctccccactcttggacattatcagctcaatgcaaacagttgctgctctggacagggaagccagaggaaaaaggcctctgcagtacacgccataacatggattaaaaaaaaaataaattggccaggcgcagcctgcctgtaatccagcaatttgggaggctgaggcaggaggatcacttgaggcctggagttcgaaaccagcgtggtcaacacggtgaaacccagtctctactgaaaatacaaaaattaggcgtggtggcacacacctgtaattccagctacgggaggctgaggcatgagaatcatttgaacctgggaggcagaggttgcagtgagccgagatcgtgccactgcactccagcctgagtgacagaacaagactctgtctcaaaaaataaaaataaaaaaatgtttatacttacaaacaactcctagtgaacaacccaggttttggaaacaactttcagagatcccttcagcctgtttcatgttttctttttgttcttctcttccaagggcatgcggttagcctttggttacggaggcctttgcccttgcaaaaaaagtaattttcagccctgttcccagcaccagccgctcgcagctgcacagccctccctgaatgtgtgaaccaaaagtcagggttccaagaagaaagagcatccgccacccccatcccacccccaaccctaccccaggtcttgtagagtataagaccgaggttcccagccctgagatactgggaggcatcaggcaagccgataccccccatccactcccagtcaccagcactcaccccacaggctaacggtccaagcagaactctctggcagctgatggtgggtttagagggtttagctgatgtgagagtcgggaccctgggcagtgtttgcgacagaaatgacagtagacacccagtgttgcagaaccccagatctggaaggacttcggagattacccagaccaactaccccccttcttgttttacagttgggcaaattgaggcccagaaaggggaaagagatggggctaagatgtgtcaccagctggtggtagagcctagatgggaccatagcgctgtgcctcctattcaggtgctggtcaccccactctttcatctgtggaattatctgtatgatcaagtttggggctgggggcaggacaaccatggttaggcaggggccactgacgccagactgccagcgttcaaatacttacttctaagtgaagttcttctcacagagccttggcttctttatgtgttaagcagtgaggataataacagaccctgggctgagcgtggtggttcacgcctgtaatcccagcactttgggaggccaaggtggctggatcacttgaggtcaggagttcaagaccaacttagccaacatggtgaaaccccatctctactaaaaatacaaaaattatccggacgtggtggcaggcacctgtaatcccatctacctgggaggctaaggtaagagaattacttgaacccgggaggcagaggttgcagtgagcagagattacaccactgcgctccagcttgggcaacagagcaagactccatctagaaaataaaaataaataaataaataacagaacctgctctgagtttgtcttaaggaagaaaggccatgatgcaggtgaggcccctggactgacctggtacttgctagaacttaactgatgctggcgaccatggcattgctggtggtggtgctggttgttgtagtgggttaaacggtgcacacccccctcccccaatatgtccacgccctaatccctggaacctgtgaatgcgatgttatttgggaaaagagtctttgctgatgtcatttaagttatggatcttgggaggaggtcaccctcaattacccaagtggggcctaaatgccatcacaagtgcctaggttacacagaagaggagaagccatgtgtagacagaggcagagggtggagcgatgcagccacaagccaaggagcacctagagctgccagacactggaagtagcaggaagggtcctccccgagcctggggagggagcatccccttgctgacttcaatctcagacttttggcctccagaacagcaagagaatcatctgtgttgtttgaaggcaccacgtttgtagtgatgtgttcctcagccgtaggaaggaaatgaatacaggggtgttgagaatgaggatgaggacagggtgataataatgatggtggtggtgatgctgatggtggttatatacatgaataccggggtgttgaggatgaggatgaagacaatgatggtgatggtgatgctgatggtggttatattcacttgctagagccgcctcacagttccagaggcccgaggtccactgtaagggtgtgggcagggccatgttgcctcttaagtccccggggaagcctcggtcccaggccttactccagcttctggcagccttggcatgtgaccgcgtcactcctgtcctccggtcctcccatcctcccgccctccgtcttctcatcatcttcactctgcatgtctgttcacctttcccctttttctaggaacctcagtcttactggattagggctccccaatgacctcaccttaacctggttacgttacctctgtaaagaccacacgaagccacattctgagggactgggcttaggacttgaacctaacatttttgtcttttatttatttattttttttgagacggagttttgctcttgttgcccaggctggagtgcaatgacgtgatctcggctcactgcaaccgccgcctcccggatacaagcaattctcatgcctcagcctctcaagtagctgggattacaggcgcccgtcaccacgcccggctaattttttgtattttcagtagagacggggtttcaccattttggccagcctggtctggaactcctgacctcaggtgagccacccacctcaacctcccaaagtgctgggattataggcatgagccatgatgcctggccgaacctattttttgggaggacacaatttccctcatgacagtggtgatgatggaggtgatggtggttggtcatggaggtgatgattgtagtcatggagatgacagtgactgccatggtgatggtcctaggcctcagccctggacccctaaaccctgcaggtgctccttgggctgcagtggtcagttcatagtctctctgggggtccggagtctgttctctgcaatggagagcagagttggattgtcaactgaaggagcagagaggtgagaaagatgatcccaggatgctattgccaagttagtgtcctttctgcacccttctgaagctctgccagaccagccaccagcggtgaggtctgggctagccctctaatctctgccagccactggttgagacctgggtttgtggagggagcggctcagccccaggcctctgggagtttgggatggcacccggtggagacatgggagcccagccgcctcagccaggaaggcgtgcatcagggcgagtggactgtgaggctggggcaggtatgggtgagagagctcttcctgctcctccgcacctgacttttccctgtcatgtgcaagcccttgctatttttatacacagctaagtcagtgcttgtctctggcccctccttgctgccagaaacctcctggagggtagggaccacgatccgcacgtctttgagttgcccagagcatgagcaggtcctccacaaatgcagagtgagtctggaccgtattttctggaagaacagcaagtacctcccttctccctccatctgggcaccatggagataagatcggggaggccagctgtttttggatgggatctttctctaccaggccctgggctacccaaggaagctgggcagaaccacagagtcagcctggcctggcctttcttctggagtccacggaccgtggtaaccgtggcagcaggaagacagagcccggaggacagaaagcccactggtctttggtctttgacggaagccaggcaggagcaggccactgtttgttgttgtttttttcttattagacataattacatcaaccctatcctcaatctctcttcctctagcttttgccaagcaatagtggtaataatagtcatagttagcattccttcttttgttcaatcaatatttatgagcacagactcttgccaggcactcttccatgcaccaggagacattgaacagcaaagccaagttccagctttttcaaggctgaccttctgggaaagagacaaagaaccaggaaaccaacgctaggatccagggagcaaggtgaggggctagagcagagaacaagagggctggaatttggacaaggagcccagggaggcgaggagatgccactggagccgagacctgggtggagggagggagtgaggcctgcagggagcctggagcagcaggtgccatggccctggggtgggtgcccggcgtcctgaccctaaggacacctgaagccaaggagggtgagggcaggggcgagcccagggtcagtgtgtgtgtgtgtgtgtgtgtgtgtgtgtgtgtgtgtgtgtgtgtgttctgagacaaggccttgctctgtcacccaggctggagtgcagcggtgtgatcttgctctctgcaacttcgacctcctgggctcaagcaatcctcccacctcagcctccggagtagttgggactagaggcacatgtcaccacacctggctaatttttgtattttttgtagagatgaggtctcgccatgttgcccaggctggtctcgaactcctggactcaagcgatccactcaacttggcctcccaaagtactgggattataggcgcgagccccagcgcccggcttgatttgtatttttaaacaatctctctggtttctgagtgagaatagactgaagcggccgagggaagctggggaaactgatcacaattctcagctgggagctgatagagcccagaggggagatggcggtggcctggttggggacggcagcagtggagatgataatggctgggttttggatatattttaagtagagccatcaggatttgtgaaaggatcagatgcggatgtggaagaaagaaaaatatcaagcctgactcctgggccatcgacagtgggaggtgccatttcctgggatgaggaagaccacaagagaagctggggtggggctggggtttggggggatcactgtacctccatggccttctcgaagcctcacactgagtgtcttgtgaaaccagtcctcgctccctgctttggttcacttcctctttatgcttccccctggcctggcttgcctcctcttcgtgtctggtttctgtggatgttcagcccgacggccactccctggcactgccagtccatctctctcccctcccctcttactcccccccaaaacatcccctcttacctgcccccccaaaacatcccctcttacccgaccccctccaaaacatcctgtggatgctgttccctccgccaggaataccgttcccactgctctttgcaccactgctcctgagaccccatcaagagctgggatttgctcagttatgcccaaaaatctcacgtgatattcgtatgttacacacttgcagatattgaatactccctgaaaccatttaatccacataaccaccccatgaggtaggcactacgatcatccccattttatcgatgaggaaactgaggcccagataggttaaataatttgcccaagggtcagagctggtgaggatgtgaacccaggcagtctaatcccaaaattgatgctcttgtttgttcatccattcattcaccatcgcatgccctgtgcgctaggctttgctctaagctctggtaccttccatggagtacaccatgagggcactggggaggcaatggtaggcagggcagcccaggctgaacctgcatggagctaactttccaaggagacaggcaggtgacctgcaaagagaaacacagtgatgtgagaaatgcacactggcggggctaagggctaagtgcaaaggcagaagggagtcacagggcacactcagcagggaggcgaggctgcctcggaggaggggaggggtctcaggagcagccatgcaaaaagcagtgggaatggcattcgcagcggagggaacggcctatgcaaaggatctcttggtgggagagtgagtagggaggacacagtgatccactggcagtgccagggaatggcggggggctgagccaaggaaaccacagcagggagtgagggcactggtctcacaaggccctcagcctgaggctttgagaaagacattgaggtaccgtgacccccaaacctgacacatccagttctggccccgaccccagtgcaaaccaggagaaagaccgccaagacaacatcctgttgcacaagagggccccggcccacacagggtggggaggctcagcccccagccctgctcccttttctattgaaagcatcaggacttgaacccagggctgacttcacagccacagctggagactgtcccacccccaggctggctatcaatgagcaggtcagcatctgccctctgtccacgtctagaaagggccaggtggagctggtgttctcaggccacaagccccagctgccccacaggtcattcattctttcactcactcactcattcacctgacagctgttggtgaatacctcaatgtcccaggcaccctaccccctgctgaggatgcagcagagaatgagacaagatcccatccctcaaggagctgacattctgctggggggagcctgaggattaataaacaagtataaaatcagtagaggtacaagtaccatgaggaggaagggggtggagacaggagaaagaccggctttgctgttagagctgagacagaccccgactttggggacagcactctgaggatgcccctgtggcctcaggtctttccagtccaccctgtcccctgctcatggaggtgcagtgacccccttactccccacactctgcctcccttggagcccctgcccctccctccttggttggcttccaatcttggggcaaagccagatctctgagggagcagagcaccctcccaatgtccaggggtctgtgtcagagctggggaggggctgggccctgctcacagtgggagggccccccctagccctggggagggtgcaggctccatcccccctttgctcccccaccccatcttctgctgggcacagaaagctggggaacagggcccctgagctctgggccctggagcagaaacttcaggtgggctgagggcagagggaagggctgaatacctaaagacttgcccagcagataaaacagcaaataacccccactcccatttcaacctcagcacttgctgagctcagagcattccagggtgatcttagcgcagcctcacacctggaagggttgtgctgttgttatccccattttatggaggaagaaacagaggctccgtgggtccagaaattcacccagactccaacgcagggccgatgacactcagcgggcatcagcagaatggctgagagccccaggcatccagtgagaggccccaatacctgactcactcaggcccaccctccaccagacagaactccccaaacccaaaacatccagtgcgggctctgaccccagtgcaaacccagagaaaggctgccaagaccagactctgctgcagaggaaggcctgggcccacatggggtgaggaggctcacccccagctctgcccccttcttgtactgaaagtatcaggacttgaacccagggctgactctacagccacacctggaagcaccgggcagtcacacccccaggctggctatatggaggccccactgggtcctgagggcaggtggctgtatcatccccttagggagggagagggggtcagtcacccctcaaagttgcacagctagtgaatgggggtgagattcaaacccaggactgtcgggctcctaccagcacctagagagcagtggggaagagggcccgagaactctggcgaggaggctccccacatccatggcggcgctagacccagacgtggaggctcggtcacctctgaggctgcacacagtggtcctggtgcaggacccatggccacctggccgccctcagatcctgtgctgagtggccgtctctgctgcccctgccctgacccaacccctctgctctcagggctgtgcccacttccagatccctgccctgggaccagcactggtcgggcacgctggggattcctgccagaattctggaagcttgggccccatcaaggcggtctcttgcccctgagactcagaagatggagccacaggaccaggggagcccgcccagcctggaaccccaccccaccatgaggcgcctgcaggcctggggacattggggctgggcaaggggtccccttcctctgcctcctcctggggccaggctctgaccctccactgctgccgtaacaactgcacgggctgcgtgtatgagctgcgtgtgtgggctgcgtgtatggactgcgtgtatggactgtgtgtatgagctgcgtgtatgggctgcgtgtatgggctgcctgtgtgggctgcgtgtatgggctgcgtgtctgcaccagcccctgcctgtgcctccgtgtgtctttgcacgtgtgtgcatgtgcgcatgttggggtgagcagaaacagcaggacaggagagggagggagagaggggagatgcaggcagcagagggctggggtgacacagagactgtgctggaaatgcacagagagcaggggacatgccatagctggggggagaggccctcggagagagggatgacagacaggatggaggggtcccagccaggagccagtccaggtggcagaatcaggaaagcagaggcctgagggagagaaaaggaaaaggagagaggagaggggaggaggagggaagctgagtccagaccgcagcagggggcccagagagtggggcagacagagggtcttggatgggatgaggaggacaaagccagcacgtggtgtggggcacaggcagcaccttctccaccagccatcctgagtcagccccacagaaaagcccgggggtcaggagcaggtggggaagcaaagcggggcgggggctccctcactcccagccccatcctgacctggggagaggacaggcatgagaccagcctcggaaagagatggtggagtcccccaaggctgcaagttcctcacacttagccccaaacacctcttctctgcaccagctggggctgtgtgaccttgggcagaggacgctgcctctctgggtctctgagccccgggaaggtatcaagcctggtgcctgcgtgaaggctcagcgaggtgagacctgggtcctgttcaggtgggtctgctggcagcgcccgaggtgctgggcaggtgcctcctttatcaccagggagagtgaaatagggcccgaggtacgtagttgctgtgacctgagcagagaaatgtgcaaactgtaaagtgctgaggacaacaggttgcttattttaagtgatattcacaaagatcaattcaggttcgtgccagatgggggaagagggagggaggtgcgttgagaagaaatctctgaagacccaggttggaggggcagagacagcctggggaaggagcagggctgtgctggccccctcccaggccgcatggaggtcccaccagagccaggctggacccctgggagtcccagaaagccatgagcatcagggtgggccctgcagaaggtttgccttggagacgtgggctccaggaaccccctcagccccagaatcccctcacaatgcccccacctgattccccccaccctgttgtccagggggaggctgccgagggcagagaaaaataggggatgggggagagaagctggggtccccacattccaacttggggttttttccattccctaaaagcaggcagaatggtgtcaggagaggagagaaaagggggagagagaaaaggaagaggtggaaaaaggaaggcagggaaggagaggaacaaatggagaaggattggaaccttgagagaggctgcccaaggaaagggctaaatgagaagagaagggaggggaaggcagtgagaggctccctgtcttccagagacaaaggctgaggaggaaggagaggagggggagcaggtgagggaggcagcggcaggaaggggaggccagatagcggcaggcctagacacagagccggggccccagacccaggcaggcgagagaccagcctccatccagccgaggccccagcggcggaagaggggagtgcactagcaacttaagagggaaaagtctgccagttgcccttggggctgccatgacagaaaaaacctcatccaggtgtcagagagtagcctgcacacgaatgcacagcagtgagctacaaatactggcttgagagggaagagggcgaaggagggaggatggggagggagggtgcaggaaagaagaggaggagagttggtggggagttgaggagcagggctgcgggtccaggctcaggtagcctcagttttgcagaggcgcagatacagagagatgactgctttgggagctgcaaaccactgggccccgtgaccccactcatggataggggcaaggtggggaggaaagaactggagagagaaaaggggagagggagggaccgagagaacctcagaaacagggagatctcgagagcagagctgtgaagggcagggctggggaggagggtggggagatgaggaagggaaggcaggagggagaggggagagggacggaaggagagaaggacggaaagagggagataaggagcgggagggacaagggagggaagggcaggaagagggcaggacagggaggaagaagggagggaggaagggcaggagaaaggggggtgggggaggggtggaaaagtgtccctggggctctgaggcacagaccaccaagggactgagcacctaagctggtctcctcccaccccttgccccctcccacccccttgctccactactggatcctggggagtctggcaggggctgtcagggttaagcagtgggctccccttccaggcctgctccagacagcagcccccaccctccctttgttcacgtcactggaagggtgggcctaggctggggcctggctccttggagaagacccaccagtgatctagcagggcccagagccagggctgggcctggacattccaagtcaattcaggactcagagcaccccagaggggaagggacctgggttgtcccctggagtcactagcatctgcggcgaaactccccccgcccccactggtctgccctggatcctaagggtagagggacagcgtggcgggaagtagcccactccacctgggcaggaacaaacccacagccacccgaggaagagagaatgctggcaggatagtcatggagcgggggctcaggaaggcctctttgaggagacagtcttaacacctgagagctgagaagaattcagcctcacaaaacccagagacgtggccctcaagagggagatggggctgggagacatggtggagtggccaggccgggagtggctgcagggtttgagcctgggcccagcaggtctggcaggtcaccccaggggtctcctgcttgctcctgagccagtgtctgtgagagctgggtggcaaggccagcgggaggctgagggacccagggcccgggcatgtgggaagcgagggcggcctctccttggttcctcggcagcctggaccctcaccccctgcaaggtcctggtggccaccgcttgcagggccgtccctctgggagtgggcaggggggctgggggacactgggaagaccttcacccctccgaaggcaaggcctggtcacgttcatcctccatccctttcccgcctggactcctcctgtgtgctgggagcacttggccgtgtgagaacagggcagcatggtggacgggccagcatggcacggcgaggtctgagcccctggctactctccccagccctgagaactcaggctgctccgtaagctctgtgggcctcaggctcctggtcgctagaatggagccacaggcaggctacccagaagtgagatgcctgccaaaaagccgtgtgcccagcccagagccaagacttggtccatcgagccccagctcaaaagccctatgagaggccggccctgagcaccgtccctgtccctgtgtgccacttcagtcacaattcagcagctcgcagccgcccactgaggctgagcctctgttcaaatttgcctcgatgtttgctggtcactgattcaggtcttcgggcctcagcttccttacccacaaactgggggcggcctctgggggctgttgtaaggggagctggaggccacaggctctggcctggagcacttcgctctccaccactgtcttctcctgacgtctgtgtttcctcgtatctcatggtaccgcgtctcctccgcaggacctgtgtgtcctgtgtgacgctgtgtgccacccaccacatcttcagcccctgagaaagattctggtggtggaggctgttgagtaaatgctcacttgagcttctcccactaccttggagcccctcttctatttgtctccaaattctctttgctgacagagtgcacagttcaaaaccccacactgggatgaactagaggacgcccaggtccagctcaggagcagcttcatgtcccctccactgctgtacctctagggcctccctctgccactgccatctactaggacattcttcctgggcccctgtgggacaaggactgcctttggctagtgtggggaaaagaaagagagatcagactgttactgtgtctatgtagaaagaaatagacataagagactccattttgttctgtactaagaaaaattcttctgctttgagatgctgttaatctgtaaccctagccccaaccctgtgctcacagaaacaggtgctgtgttgactcaaggtttaatggattcagggctgtgcaggatgtgctttgttaaacaaatgcttgaaggcagcaagcttgttaagagtcatcaccactccctaatctcaagtaagcagggacacaaacactgcggaaggccgcagggacctctgcctaggaaagccaggtgttgtccaaggtttctccccatgtgacagtctgaaatatggcctcttgggaagggaaagacctgactgtcccctggcccgacacccgtaaagggtctgtgctgaggattagtaaaagaggaaggaaggcctctttgcagttgagataagaggaaggcatctgtctcctgctcatccctgggcaatggaatgtcttggtgtaaagcctgattgtatatgccatctactgagataggagaaaactgccttagggctggaggtgggacatgctggcggcaatactgctctttaaggcattgagatgtttatgtatatgcacatcaaaagcacagcacttttttctttaccttgtttatgatgcagagacatttgttcacatgttttcctgctggccctctccccactattaccctattgtcctgccacatccccctctccgagatggtagagataatgatcaataaatactgagggaactcagagaccggtgcggcgcgggtcctccatatgctgagcgccggtcccctgggcccacttttctttctctatactttgtctctgttgtctttcttttctcaagtctctcgttccacctgaggagaaatgcccacagctgtggaggcgcaggccactccatctggtgcccaacgtggatgcttttctctagggtgaagggactctcgagtgtggtcattgaggacaagtcaacgagagattcccgagtacgtctacagtgagccttgtggtaagcttgggcgctcggaagaagccagggttaatggggcaaactaaaagtaaagtctctcattccacctgatgagaaacacccagaggtgtggaggggcaggccaccccttcagggtagggtcccctccatgcagaccatagagcacaggtgtgccccaaagaggagcagagagaaggagggagagggcccacgagagacttggaaatgaatggcaggattttaggcgctggacttgggttcggggcacctggcctttccttgtgtatttctcctactgtctgcctaactatttaatacaataaaagaaaaccagcccctggttcttgtggtgtttccaccctcccgggtccccgctggctgcctggcttcctcccgcagctcctgctgtgtgtgtatgtgtgtgtgtgtgcacatctgtggggcgtatgtgtgttcgtctttgtaattgaggctgcagagtggagagagcaggggttttctctggggacccagagagaaggaggcgttttcaccacagccgaacagggcaggaccccagcacccgggacccagcgggactttgccaaggggatggacctggctgggccacgcggctgtttgtgtagggaaaagaaagagagatcacactgttactgtgtctatgtagaaaaggaagacataaactccattttgagctgtactaagaaaaattattttgccttgacctgctgttaacctgtaactgtagccccaaccctgtgctcaaagaaacatgtgctgtatggaatcaaggtttaagggatcaagggctgtacaggatgtgccttgttaacaatgtgtttacaggcagtatgcttggtaaaagtcatcgccattctccattctccattaatcaggggcacgatgcactgcggaaagccacagggacctctgcccgagaaagcctgggtattgtccaaggcttccccccactgagacagcctgagatacggcctcgtgggaagggaaagacctgaccgtcccccagcccgacacccgtaaagggtctgtgctgaggaggattagtaaaaggggaaggcctcttgcagttgagataagaggaaggcctccgtctcctgcatgtccttgggaatggaatgtcttggtgtaaaacccgatagtacattccttctattctgagagaagaaaaccaccctgtggctggaggtgagatatgctagcggcaatgctgctctgttactctttgctacactgagatgtttgggtggagagaagcataaatctggcctatgtgcacatctgggcacagaacctccccttgaacttgtgacacagattcctttgttcacatgttttcctgctgaccttctccccactatcgccctgttctcccaccgcattccccttgctgagatagtgaaaatagtaatctgtagataccaagggaactcagagaccatggccggtgcacatcctccgtacgctgagcgctggtcccctgggcccattgttctttctctatactttgtctctgtgtcttatttctttcctcagtctctcatccctcctgacgagaaatacccacaggtgtggaggggctggcccccttcatctgatgcccaatgtgggtgcctttctctagggtgaaggtactctacagtgtggtcattgaggacaagttgacgagagagtcccaagtacgtccacggtcagccttgcggtaagcttgtgtgcttagaggaacccagggtaacgatggggcaaactgaaagtaaatatgcctcttatctcagctttattaaaattcttttaagaagagggggagttagagcttctacagaaaatctaattacgctatttcaaacaatagaacaattctgcccatggtttccagaacagggaactttagatctaaaagattgggaaaaaattggcaaagaattaaaacaagcaaatagggaaggtaaaatcatcccacttacagtatggaatgattgggccattattaaagcaactttagaaccatttcaaacaggagaagatattgtttcagtttctgatgcccctaaaagctgtgtaacagattgtgaagaagaggcagggacagaatcccagcaaggaacggaaagttcacattgtaaatatgtagcagagtctgtaatggctcagtcaacgcaaaatgttgactacagtcaattacaggagataatataccctgaatcatcaaaattgggggaaggaggtccagaatcattggggccatcagagcctaaaccacgatcgccatcaactcctcctcccgtggttcagatgcctgtaacattacaacctcaaacgcaggttagacaagcacaaaccccaagagaaaatcaagtagaaagggacagagtctctatcccggcaatgccaactcagatacagtatccacaatatcagccggtagaaaataagacccaaccgctggtagtttatcaataccggctgccaaccgagcttcagtatcggcctccttcagaggttcaatacagacctcaagcggtgtgtcctgtgccaaatagcacggcaccataccagcaacccacagcgatggcgtctaattcaccagcaacacaggacgcggcgctgtatcctcagccgcccactgtgagacttaatcctacagcatcacgtagtggacagggtggtgcactgcatgcagtcattgatgaagccagaaaacagggcgatcttgaggcatggcggttcctggtaattttacaactggtacaggccggggaagagactcaagtaggagcgcctgcccgagctgagactagatgtgaacctttcaccatgaaaatgttaaaagatataaaggaaggagttaaacaatatggatccaactccccttatataagaacattattagattccattgctcatggaaatagacttactccttatgactgggaaattttggccaaatcttccctttcatcctctcagtatctacagtttaaaacctggtggattgatggagtacaagaacaggtacgaaaaaatcaggctactaagcccactgttaatatagacgcagaccaattgttaggaacaggtccaaattggagcaccattaaccaacaatcagtgatgcagaatgaggctattgaacaagtaagggctatttgcctcagggcctggggaaaaattcaggacccaggaacagctttccctattaattcaattagacaaggctctaaagagccatatcctgactttgtggcaagattacaagatgctgctcaaaagtctattacagatgacaatgcccgaaaagttattgtagaattaatggcctatgaaaatgcaaatccagaatgtcagtcggccataaagccattaaaaggaaaagttccagcaggagttgatgtaattacagaatatgtgaaggcttgtgatgggattggaggagctatgcataaggcaatgctaatggctcaagcaatgagggggctcactctaggaggacaagttagaacatttgggaaaaaatgttataattgtggtcaaatcggtcatctgaaaaggagttgcccaggcttaaataaacagaatataataaatcaagctattaacagcaaaaaataaaaagccatctggcctgtgtccaaaatgtggaaaagcaaaacattgggccaatcaatgtcattctaaatttgataaagatgggcaaccattgtctggaaacaggaagaggggccagcctcaggccccccaacaaactggggcattcccagttaaactgtttgttcctcagggttttcaaggacaacaacccctacagaaaataccaccacttcagggagtcagccaattacaacaatccaacagctgtcccgcgccacagcaggcagcaccgcagtagatttatgttccacccaaatggtctttttactccctggaaagcccccacaaaagattcctagaggggtatatggcccgctgccagaagggagggtaggcctttgagggagatcaagtctaaatttgaagggagtccaaattcatactggggtaatttattcagattataaagggggaattcagttagtgatcagctccactgttccccggagtgccaatccaggtgatagaattgctcaattactgcttttgccttatgttaaaattggggaaaacaaaaaggaaagaacaggagggtttggaagtaccaaccctgcaggaaaagctgcttattgggctaatcaggtctcagaggatagacccgtgtgtacagtcactattcagggaaagagtttgaaggattagtggatacccaggctgatgtttctgtcatcggcataggtactgcctcagaagtgtatcaaagtgccatgattttacattgtccaggatctgataatcaagaaagtacggttcagcctgtgatcacttcattccaatcaatttatggggccgagacttgttacaacaatggcatgcagagattactatcccagcctccctatacagccccaggaataaaaaaatcatgactaaaatgggatagctccctaaaaagggactaggaaagaagtcccaattgaggctgaaaaaaatcaaaaaagaaaaggaatagggcatcctttttaggagcggtcactgtagagcctccaaaacccattccattaacttgggggaaaaaaaaacaactgtatggtaaatcagcagcgcttccaaaacaaaaactggaggctttacatttattagcaaagaaacaattagaaaaaggacattgagccttcattttcgccttggaattctgtttgtaattcagaaaaaatccggcagatggcgtataatgccgtaattcaacccatgggggctctcccaccccggttgccctctccagccatggtcccctttaattataattgatctgaaggattgcttttttaccattcctctggcaaaacaggattttgaaaaatttgcttttaccacaccagcctaaataataaagaaccagccaccaggtttcagtggaaagtattgcctcagggaatgcttaatagttcaactatttgtcagctcaagctctgcaaccagttagagacaagttttcagactgttacatcgttcactatgttgatattttgtgtgctgcagaaacgagagacaaattaattgaccgttacacatttctgcagacagaggttgccaacgcgggactgacaataacatctgataagattcaaacctctactcctttccgttacttgggaatgcaggtagaggaaaggaaaattaaaccacaaaaaatagaaataagaaaagacacattaaaagcattaaatgagtttcaaaagttgctaggagatactaattggatttggagatattaattggatttggccaactctaggcattcctacttatgccatgtcaaatttgttctctttcttaagaggggactcggaattaaatagtgaaagaacgttaactccagaggcaactaaagaaattaaattaattgaagaaaaaattcggtcagcacaagtaaatagaatagatcacttggccccactccaaattttgatttttgctactgcacattccctaacaggcatcattgttcaaaatacagatcttgtggagtggtccttccttcctcacagtacaattaagacttttacattgtacttggatcaaatggctacattaattggtcagggaagattatgaataataacattgtgtggaaatgacccagataaaatcactgttcctttcaacaagcaacaggttagacaagcctttatcaattctggtgcatggcagattggtcttgccgattttgtgggaattattgacaatcgttaccccaaaacaaaaatcttccagtttttaaaattgactacttggattttacctaaagttaccaaacataagcctttaaaaaatgctctggcagtgtttactgatggttccagcaatggaaaagtggcttacaccgggccaaaagaatgagtcatcaaaactcagtatcacttgactcaaagagcagagttggttgccgtcattacagtgttaacaagattttaatcagtctattaacattgtatcagattctgcatatgtagtacaggctacaaaggatattgagagagccctaatcaaatacattatggatgatcagttaaacccgctgtttaatttgttacaacaaaatgtaagaaaaagaaatttcccattttatattactcatattcgagcacacactaatttaccagggcctttaactaaagcaaatgaacaagctgacttgctagtatcatctgcattcatggaagcacaagaacttcatgccttgactcatgtaaatgcaataggattaaaaaataaatttgatatcacatggaaacagacaaaaaatattgtacaacattgcacccagtgtcagattctacacctggccactcaggaggcaagagttaatcccagaggtctatgtcctaatgtgttatggcaaatggatgtcatgcacgtaccttcatttggaaaattgtcatttgtccatgtgacagttgatacttattcacatttcatatgggcaacctgccagacaggagaaagtacttcccatgttaaaagacatttattatcttgttttcctgtcatgggagttccagaaaaagttaaaacagacaatgggccaggttactgtagtaaagcagttcaaaaattcttaaatcagtggaaaattacacatacaataggaattctctataattcccaaggacaggccataattgaaagaactaatagaacactcaaagctcaattggttaaacaaaaaaaaggaaaagacaggagtataacactccccagatgcaacttaatctagcactctatactttaaatgttttaaacatttatagaaatcagaccactacctctgcagaacaacatcttactggtaaaaggaacagcccacatgaaggaaaactgatttggtggaaagataataaaaataaaacatgggaaatggggaaggtgataacgtgggggagaggttttgcttgtgtttcaccaggagaaaatcagcttcctgtttggatacccactagacatttaaagttctacaatgaactcactggagatgcaaagaaaagtgtggagatggagacaccccaatcgactcgccaggtaaacaaaatggtgatatcagaagaacagaaaaagttgccttccatcaaggaagcagagttgccaatataggcacaattaaagaagctgacacagttagctaaaaaaaaaagcctagagaatacaaaggtgacaccaactccagagaatatgctgcttgcagctctgatgattgtatcaacggtggtaagtcttcccaagtctgcaggagcagctgcagctaattatacttactgggcctatgtgcctttcccacccttaattcgggcagttacatagatggataatcctattgaagtagatgttaataatagtgcatgggtgcctggccccacagatgactgttgccctgcccaacctgaagaaggaatgatgatgaatatttccattgggtatccttatcctcctgtttgcctagggaaggcaccaggatgcttaatgcctacaacccaaaattggttggtagaagtacctacagtcagtgctaccagtagatttacttatcacatggtaagtggaatgtcacagataaataatttacaggacccttcttatcaaagatcattacaatgtaggcctaaggggaaggcttgccccaaggaaattcccaaagaatcaaaaagcccagaagtcttagtctgcggagaatgtgtggctgatactgcagtgtagtacaaaacaatgaattttgaactatgatagactgggtcccttgaggccaattatatcataactgtacaggccagactcattcatgttcacaggccccatccatctggcccattaatccagcctatgacggtgatgtaactgaaaggctggaccaggtttatagaaggttagaatcactctgtccaaggaaatggggtgaaaagggaatttcatcaccttgaccaaagttagtcctgttactggtcctgaacatccagaattaggaagcttactgtggcctcacaccacattagaatttgttctggaaatcaagctataggaacaagagatcgtaagtcatattatactatcaacctaaattccagtctgacaattcctttgcaaaattgtgtaaaactcccttatattgctagttgtaggaaaaacatagttattaaacctgattcccaaaccataatctgtgaaaattgtggaatgtttacttgcattgatttgacttttaattggcagcaccgtattctactaggaagagcaagagagggtgtgtggatccttgtgtccatggaccgaccatgggaggcttcgctatccatccatattttaacggaagtattaaaaggaattctaactagatccaaaagattcatttttactttgatggcagtgattatgggcctcattgcagtcacagctactgctgcggctgctggaattgctttacactcctctgttcaaactgcagaatacgtaaatgattggcaaaagaattcctcaaaattgtggaattctcagatccaaatagatcaaaaattggcaaaccaaattaatgatcttagacaaactgtcatttggatgggagaggctcatgagcttggaatatctttttcagttacgatgtgactggaatacatcagatttttgtgttacaccacaagcctataatgagtctgagcatcactgggacatggttagatgccatctgcaaggaggagaagataatcttactttagacatttcaaaattaaaagaattttttttttctttgagacagagtctcgctctgtcgcccaggctggagtgcagtggcgtgatctcagctcactgcaagttccgcctcctgggtttacaccattctcctgcctcagcctcccaagtagttgggactacaggagcccaccaccatgcctggctaattttttttgggtttttaatagagatggagtttcaccgtgttagccaggatggtctcgatctcctgaccttgtgatctgcccaccttggcctcccaaagtgctgggattacagtcgtgagccaccgtgcccagccaagaaaaaatttttgaggcatcaaaagcccatttaaatttggtgccaggaacggagacaatcgtgaaagctgctgatagcctcacaaatcttaagccagtcacttgggttaaaagcatcagaagtttcactattgtaaatttcatattaatccttgtatgcctgttctgtctgttgttagtctacaggtgtatccagcagctccaaagagacagcaaccagcaagaatgggccatagtgacgatggtggttttgtcaaaaagaaaagggggggatatgtaaggaaaagagagatcagactttcactgtgtctatgtagaaaaggaagacataagaaactccattttgatctgtactaagaaaaattgttttgccttgagatgctgttaatctgtaactttagccccaaccctgtgctcacggaaacatgtgctgtaaggtttaagggatctagggctgtgcaggatgtaccttgttaacaatatgtttgcaggcagtatgtttggtaaaagtcatcgccattctccattctcgattaaccaggggctcaatgcactgtggaaagccacaggaacctctgcccaagaaagcctggctgttgtgggaagtcagggaccccgaatggagggaccagctggtgctgcatcaggaaacataaattgtgaagatttcttggacatttatcagtttccaaaattaatacttttataatttcttacacctgtcttactttaatctcttaatcctgttatctttgtaagctgaggatatacgtcacctcaggaccactattgtacaaattgattgtaaaacatgttcacatgtgtttgaacaatatgaaatcagtgcaccttgaaaatgaacagaataacagtgattttagggaacaaaggaagacaaccataaggtctgactgcctgaggggtcgggcaaaaagccatatttttcttcttgcagagagcctataaatggacgtgcaagtaggagagatattgctaaattcttttcctagcaaggaatataatactaagaccctagggaaagaattgcattcctggggggaggtctataaacggccgctctgggagtgtctgtcctatgtggttgagataaggactgagatacgccctggtctcctgcagtaccctcaggcttactaggattgggaaaccccagtcctggtaaatttgaggtcaggccggttctttgctctgaaccctgttttctgttaagatgtttatcaagacaatacatgcaccgctgaacatagacccttatcaggagtttctgattttgctctggtcctgtttcttcagaagcatgtcatctttgctctgccttctgccctttgaagcatgtgatctttgtgacctactccctgttcatacacccctccccttttaaaatccctaataaaaacttgctggttttgtggctcaggggggcatcatggacctaccaatacgtgatgtcacccccggtggcccagctgtaaaattcctttctttatactcttatttctcagaccagctgacacttagggaaaatagaaagaacctatgttgaaatattggaggcgggttcccccgatacctgggtattgtccaaggtttcctttgctgaggaggattagtaaaaggaatgcctccatctcctgcatgtccctgggaacagaatgttcccaccaaccaccctgtggctggaggcgggatatgctggcagcaatgctgctctattactctttgctacactgagatgtttgggtggagagaagcataaatctggcctatgtgcacatctgggcacagcaccttcctttgaacttatttgtgacacagattcctttgctcacgttttcctgttgactttctcaccactcaccctattctcctgtggcattcgccttgcggagatagtgaaaatagtaataaatactgagggaactcagactgagggaactcagactgggcagaccggggccagtgtgggtcctccatatgctgagcgccggttccctgggcccactgttctttctctatactttgtctctgtgccttattttctcagtctctcattccacctgatgagaaatacccacaggtgtggaggggctggcccccttcagtttgatttccccccgacttccaaataagttgaaattatacactaagcatctatttaattaagttttccagggtgtggataataagagacacgactggaatggggtgggcagtcccatccctgctcttgcctgttggaattctcagccctcaggccacaaaatatggcaagttgtaatgtaggggacggaagccatgggcgagccagccagagctatcactccaggatgccaggtgggcaagggggaccccaggcagctctgcctcacagaggaggttcagatgaacctcagggagcctgccaccctctctggggcctcagaagcagacaggaggagttaaagaagggccctgccctggctatagcatcaaaggactttggggcaggatcacctgggggctgttggccacaatcaaatgacagactggcagttcccttgacacacagcccctgcttcagatccttgatacttcaatctcacatcctgagagtgtgggccaccgcagggagaggcctgccgctggctggtggttctccaggcctgctgggaaaggctgtccacatggctggctccctcctgaggaggagaggcctctgtgttcttgtccacccgaatggggctcagactgtctaatcaaaccagagcccgcagtttgtgattgcacacatcatgaaccgaaggaactttctcacccagggcaggcctgcacatggggtagggggcaggccctggttctacctgagcaaggaagagaactgtcagagtggcccctctggtgtttgaaagcagctgccatggcatgagccactctctgcccccttgcccggccctcactgcatgtcctcagccaatggcctcccagccccaatgccactaaacggctcttacagaaatccccaacagaaatccccaactgctgctggggggccaaatccaagtgacccatttccttcttctccctttgatccctgtcacgttggttcccaccctcccctggttttcccctggcctccagacccccagcgctgatgcccctcttcccggccccctgactgccttgaccctgggcccagccaatacagattcatgatcatttcccccctcctcccttctgacttgggtcacccatggggccctttccctgaccatcccaaggggccctgaatcaggactgatcacattgctcagcagatgctgagtccccgagggcagccccagcatctcactcctcacacacgtccccaaggctgagtttagaacatgggatgcaatcatcgagtgcacatttattaagcaccgactgtgtgtcaggacgtgtcctaagttttctgtatgtattaagagtactcattttaatccatctgcatatcctcctgtctgtcctcccgcccaagaaaactgaggatcagaggggttacaaaacttatgcaagatgacactagtatcgtatggaatagctgggatttgagtcctagtctggtctgttgccatagcacatgggcataactgtgaaacagcctctcatccactcctcctgcccatccacccacccattctcccatccatacttcatctatcctaccattcatcctcccaatccatcctccattcatcctatcatccatccttcattcatgctcccttccatcctcccattcatcctcccatccatctttccatctttccatccatccttcaaccgtccccctgtccatcatccaactacccatccatcatccatctacccatccatcctccatccattctcctattcatccccccactcatcctccatccatctttccattcatcccctcggtcatcctccattcattcctcatccaacctccatccatcttccactcataccccatgaatcctcccatctattttcccatctatcctccatcgaccttcccatttcatcctcccatccatctttccatccatcctccatccatcctcccaaccatatttccatacattctgtattcatcctcccaatcattcccaatccttcctcccatccatcctcccacttatccttcattcatcctctcatccatctttccagccatcctcccattcattcttcattctcccatacatcctcttatccatcttctcattcatctttccatccatcctcctatttattcctctgtccatcctcccttccatcctcccattctctcgtctatccttcattcatcctccttccatcttctcatgcatcctccatccttccatccatctatctttccatcaattcttcacccgtcctcccatccatcttttcatgcgttcacccatccatccttcattcatcatcccatccatcttttcatccatcttcccatccatcctcccatttattatcccatgtatcctttatccattctcccacctattctttatttattctcccatccatcctcctattcatctttccatccatccacccttccatcctcccattcatcctcccattcattcccccttatatcctttgtctattctcccatccatccacgcttcatctttccatctttccacccatccacctttctatccatcttctatctatcctcccatccatctttccatccatactcccatccattcttcattctcccatccatctttttatccatccttcacctgtcctcccatctgtcctccatccatctatcatcctatccatcctcccatccatccatcttctcatctatccattctccctccattatcccatccatcttccatccttcattcatcctcccatccatcctccaatcatcctcccaaccatccttccatccatccccccatccattatccatccaccatccatcctctcatccatccttcattcatcttctatccatctttccatttatccttcaaccaccctctcatccattctcccatccataccccattcatcttttcacccatcctcccagccatcctccatccacacttcatccatccttcattcctcctctcatccatccttccattctcttatccatcttccatttattcctctgttcaccctgccatttatcctcccattcactctccaatctatcctccatccattctccatccattctcccatccatttttccatccatcctccaattcattcctctgtctatccccatccatcatcaccatcctcccatccattctcccttttgttctccatctatctttccatccatccttccagcaatcctccatccatccttcatccatcttctgttcatcctccattcattctctttccactttcccatccatcctccctccattctctatccatcctctcatccattttttccttccatcctccatccattctcccatccttttgtcggatcctcccatgcatcctcccatccatctttcatttcatccttcaaccaccctcccattcatcctctactcatcttttcatccatcctcccagccattctccatccatctttcatccatcctccatccatcttccattcatccacccatccaccctcccatcaatcctcccatctttctttccattcatctttcctctatttctctgtccaccctctatccatcctcccatccaccctaccgtctatcttccatccattctccatttatcttcccatccattctccctccatcttattcttcattcatcctcccatccatctttttcatccatcctcccattcattcctctgtctatcctctcctgcatcttcccatccattttcccatctatccttcattcatcccgtcatccatcctcttattcatctttacatccatcctcccatccatcttttcatccatcctcccattcattcctctgtctatcctcccatgcattctaccatccattttctcatctatccttcattcatcctgtcatccatcctcccatccatctttccatccatccacccatccatccttcattcatcctcccattcatttttccatccatcctcccattcatccattctccctctatcctcccatccatcctttcatccatcctttcgtcaattttctcatcaatgctcccatccatctttccatttatcttccatccattcctctgtccaccctctcatccattctcccatcaatcttccattcattctccatccatcctctcttctacctccctccaccttcccatctatcctccatctatcctcccatccatcctcccatccatctttccatccattctcctatccattcttctgtccatcctcccatgcatcctcccatccattttcccatctatccttcatctttcctcccacccatcctcccatccatctttctatccatccacccattcatctttcattcatccttgcatccatttttccatccatccttcagccatcttcccatccatcttctcatcaatcctctcatccatctttccatccattctcccccatcctcccatccatcctttcatccatcctcccatccacccttgcaacaatttttccatccatcctcccatccaccttcccatcaatctcccttcagtctctccattcattctcctctattccttgttcattctcttatcctcccatgccccaagccctcactcaggctttgtcatgcctctaagccttaatataggctgttctctcagccaggcctgctttttctcctctttgttggcccagggactcacacctgtgtgggacctgccctgatacactccacaccctctcctcctgcacctggccctgcctctgcagtaccaacttctcagtgtccacctcagtgccagccacagatggggagttctggtggccttgctggcccatgacctcattggggcctgctctcttgtggctcaccccaaagcagagggagtagagccacctcagggacacacacggtgggctgcgccttgggagaacacaactaattttaacaatggccttagggaagagacaaatctgtccctttattccctccttagagaaaaatctgtgtgtgcatgtgtatatgcacacatgattcagagcatcaaacgctgctgtgactcgggtgtcaccagcctcatttgcccagtgctagaggggacaaacacacgacctccagccacaggatagtagctctacatgctgactcttggcaagcagggcctggtgtttgtccagacgcccaaacccctggggatgtcctcacctggttatgtggtgcccagcagtgtttcagtgaaccttaaccaaccttggagggctgctgggcagagtgggagagcaagtgtctggctcctggtgagtgggtgcccttgtgccagctaatgacccccatggccttcagctgctttcctgtcgactggggagggggtgctcccaggctgctgtgaggaggtggccagaagagcgggaacagtcctatgtgtttccttctctccagagagcctgaccagggctgatgaattagggtgcatggcccaattcactgtccatggatccaccttggatttggggtccctgtggggatgtgaagcttcggaaactcctctgtccccccaccttccttttcccttccaagacaggatctggactcttgaaattctgcacactaataaaattgtaactaatttacatccaagatgcggagtgagtggcagcggttgtcatggagaccatctccagggccccgctgccttcgcctttcggtgcagccgagagttcaagagattctcgccgagtgctgcagctggggccagtcctcatgcctcccgggcaccctgccctgctccccccatgctgggcaggcccttgggggatggaatggaggcagccccccttggaaaggccccaagttctgccgatggtgttctgaaggtcaaagtccctctctcctgactgtacatctgcccccagcactgcccattcaccctgtgggccccactggctccgttcactccagatggaagccccctcgagggacatgaggccctatccccacagcacagccagcaaaggcactcagagtggggacagtttccagggaaggggcagagcagcagagcccaagccacccacagacctgtccacctggggtccaccctgggaaatgccccaccctggactccatgaatcccaagatggagaaaatgccctccgtggcctcacagagcttgcctgcccacaggaaagacgttgaaataaccagtactggccaggtgcggtggctcatgcctgtaatcctaacatctagggaggctgagatgggcgggtcacttgaggtcaggagtttgagaccaccatggccaacatggtgaaaaccggtctctactaaaaatacaaaaattagccgaggcatggtgactcgcgcctgtagtcccagctatttgggaggctgaggcaggagaattgcttgaacccaggagacggaggttgcagtgagctgagatcatgccactgcaccccaaccggggcaacagagtgagactccgtatcaaaaaaaaaaagaaaaagaaaaaaacgaaccagtgctgtgactctacgccacacactgtgctgaacccttcgcatgtgagatcttgtctcaatgtcaaggcaacacaatgcggtgggcaatactttaagcccccatttcatcacgaacaaaaaggttgtagacaggtgggtggataacacccaagttcggagccctggaaagtacaagggcctgaggcaaagccaggtctcattctaaaaccgtcatggaaaagctgataagctgcctgcagagaagaagcaggatgaaataattataacaaagcagggtcgatgcagtcagagaagggggtgagggcacaaaggggccctcagaatcatgaaatctaagttgggttttgagggatgaataggagttccccaaggagatacatggaagaagaatgttctaggcagagggaacatgtgcaaaggcacggagacgagaatgtgcccagaacattcaaataccataggctgggtgctggggggtgatgcggaggagggaggcgttcagttggagccgaagagggagccaggctccaaggggcttcactcaccaagctgagcgccctgcaccttatcctgtaggtgagagattaaagagctgggtccaagcaggcccacccctgacatctgtgggccctggagcaagagcagaaatgaaggtccaggtagcaaaggtctaggtgttcccaagtgagagaagcagccaggacgctgctggctgaagggctcttctgtcctccttccctcagaaatgccttcacgggcctggggaggccaggctctcatttatattcttgtctcttcagagttttccaccagaacgtgaactggaccgggggccacagtcccccagtctgaagggagactcatgaaatgcagattcctgggccctgcggcagacccaggagaccatgctcccgatgaagataaggcgctatatctttaagaggttccccaggtgataattatgcatgaaagtctagagaagccccccaccccctgctgaaagtagcaggagtccgggggtgggggtggggggtacgtacaagcagatttgtgttctagaaatggatccccagctattgggcaaatgtgggcagggaggagagctgggaggggcagagaggcctggcagcacctaggttggagagggtggcggtctggtgccaaggcaggatggttgggtggggtgtgatacgcggtgggggtggtggagggggaaggttgtgtcagcagaggctgagtttgaaattcacgatggacagggcctggtgctgatgaggcttgaaggtgagcagggatccagggcagctcctttgggatcataaaatctaatcagactgcaggaggcctgggccctgggcctccattaggcaagtacccactcccctctgctgatctgggcatccctggggccccttcactgtcacactgagggtctgagtggggaagaattaaaagcccacctctgtccccgcctaccacgatcccctacaggagcctgcagccctgctggggagactggaggagcagctgggagcagcaggccaccaggagggaaaggtgggcatgcctcgggggtgggagggtggagtggccaggaggggaggcttcccactggaggaggactttgaaccctctcactttccatacacagttccagaaatcatcttgataataaaaataatagccgtgaaaatgacagcagcaactattgcccttaatcgagcatatttttgtgccagacactgagcatgcagcaaggaagtggcagagtgggctgtcagatcctgagccatgggctggaaccagctttccctgtgccaagcagagaggggcttaaaactcaactcctacccttggaacattcacaagctgtttggccatgagactgctggagatgcctctctaggagcatctagaaggctctagaaggtccatgcctctctagaaggctacgctggcaaacactagctgttgagaccatggaggactagactgtatttatcagctgcaggagttcagaagagggagagctcatgggagctgctgggaaaggcatgacttgagctgaatgctgaaacagcggccgcatttgaagaagggagaggaggtggagaggggatcctggaaggaggctccagcctcggcaatggtgtgggggtgagaatgcagaaggagtttcaagaaggtcaaacagctgcaggggctggcgagtcactggaggcagggatggacacagatcagcccaggcctggtgcgtgtcctcctgcttatttctatacctccaggagagtatgacaccaggacatcaaggcgtccacccttgtcaggcctgggatggtgccgcactgttggggatgggtttgtgagttcccaagaagagccacccagtaagggcctcatcatgaaggggagtgagctgaggctcttgggaaaatggaggcctcagatctccccacaatcttgggagaaaggctcccataccccacacccaccttgaccaagggcccaaaaccagacgggcaacaatgcaggtccagagtcatcagcttggcctgactgtcccctgtctgcctccagcagaggtgagtaccttgggtccaaacccttctgccccatttactgtgtgaccccagagaagttccttaacctctctgaactgaattttctcactcatagagcgaggataaaaactccagcctccaaaagcgtattgatttgttttaggattaaatgggatgaagctaagaactcacttaatggggattgcagtgcagacatcatgcttgaaaaatgttacttccctcctttccacccttaaactcggggacaggtcagctgtgaccacagaaggtgcccacttgacttgtcccttgagcttccacaatcctcactgcttctgcatcatccaacagtggggccaggctgagaatcccgcctgatacagacccggttgctgtctgtctttacattttacatttaaatctatgatccattaccagcttattattattattattattattattattattattattattattatattttgagacaggatctcgctctgttgcccaggctgaaatgcagtggcacaatcacagatcactgcagcctcaaccccctcccaggctcaggcagtcctcccacctcaggattaactaaataactgggactacaggcatgcaccaccacacccggttaatgtttgtaatttttgtagcaatggagtcttgcttcgttgcccaggctggtctctaactcctgggctcaagagatctgcccaacttgaccttcaaaagtgctagggttacaggcgtgagccaccatctccagcctgctggttaattattattattttttgtcccttctctagtctgaaaggagcaagttaattttgttataagatataaggtttaggttgaggttcattttttaaaaagtagatgtccaagctgggtgcggtggctcacatctgtaatcccagcactttgggaggttgaggcaggaggaccacttgagcccaggagtttaagaccagcttgggcaacaaagtgagactcccatctctagaaagcatttaaaaattagccgggtgaggtggcacatgcctgtagtccaagctactccagaggctgaggtgcagtgagccgtgattatttctctgcactgcagcctgggagagagagagagagagagagagagagagagagagagagagagagagagagagagagagagagagagactgtatcagaaaacaaaagaaaaaaaaaggtatctggccaggtgtggtgggtcacgcctgtaatcccagcactttgggaagccagggcaggcagatcacttgaggtcaggagttcgagaccagcctggccaacatggtgaaatcctgtctctactaaaaataaaaaaattagctgggcatggtggtacatgcctgtaatcccagctacttgagaggctgaggtatgagaatcgcttgaacccaggaggtggaggtttttgtgtgctgagatcacaccgctgcactccagcctgggcaacagactgagactctgtcacaattaaaaaaaaaagatatccaattgttcatcatttgttgaaacatcatatgtttaaaaaaattttctttattcattgattactgcacagtcttgacttccctcatttcgccagccttgctatcagatcctttgtgcttttcatttcttcatttagtaaatactgagagataattggacacccatatggaaaataagaatcttgacccttacctcacatcaaatacaaagatctactcacaatggatcatagacctaaacataagatctatagctataagaaacttttagaaggaaaccgaggaaaagatctttggggctgggcacagtggttcatgcctataatcccagcacttcgggaggctgaggtaggaggatctcttgagcccaagagtttaagaccagcctgggcaatatggtgataactgtctctactaaaaaaatactaaagggatggggtctatagcgagaccccctgtctctcaaaaattagctggatttagtggtgcatgcctatagtcccagcttctcaggaggctgaggtgggaggatcacttgagcctgggaggtggaggttgtggtaagccgagatcaccccactgcactccagcctgggcaacagaacaagactatgtttcaaaaaaaaaaattctttgggacttggtgttaggcaaagagttcctagatatgacaataaagcctaatccataaagaaaaaaattgataattttcagctcataaaaatttacaacttttgctctaagaaagatactgttaagagaatgaactatgaaaaaatatttgcacatcacttatctgacaaaagtcttgtatccagaaattataaagaactctaataactcaacagttaaaaaaaaactaattaaaagtggaaaaaagactcatacagacactccctcagagaagatacagggatgacaactgaacctataaaaaggtgctcaaccattattagccaccaaggaaataaaagtcaaaattacaatgagatatcactccccgcatccttaaatggctaaaaaaaaaatactgataattccaaaagctaacaagtctgcagagcaacttaaactcttgtgcattgctgctgaggatgcaaaatgatacagccactttggaaaacagtttggcatgttcttaaaaagtgaaccatattcatatcgtatgatgtagccaacctactcctgggcatttatcccagagaaatgaaaacttaggtccatgcaaagacacatacatgaatgttcatagaagctttatttgtcatagcctagaaacaacccaaatagataaacaaactgtggtccatccataccatggactatcactcagtaataaagaagagccaagaattgatccaggcaacaccttggacagagctcaaaatgattattctgagtgaaaaaaaaaaagccaatcttttttttttttttttttttttttattgatcattcttgggtgtttctcacagagggggatttggcagggtcataggacaatagtggagggagggtcagcagataaacaagtgaacaaaggtctctggttttcctaggcagaggaccctgcggccttccgcagtgtttgtgtccctgggtacttgagattagggagtggtgatgactctcaaggagcatgctgccttcaagcgtctgtttaacaaagcacatcttgcaccgcccttaatccatttaaccctgagtggacacagcacatgtttcagagagcacagggttgggggtaaggtcacagatcaacaggatcacaaggcagaagaatttttcttagtacagaacaaaatgaaaagtctcccgtgtctacctctttctacacagacacggcaaccatccgatttctcaatcctttccccgcctttcccccctttctattccacaaaaccaccattgtcatcatggcccgttctcaatgagctgttgggtacacctcccagacggggtggtggccgggcagaggggctcctcacttcccagtaggggcggacgggcagaggcgcccctcacctcccggacggggcggctggccgggcggggggctgacccccccacctccctcccggacggggcagctggccgggcggggggctcacacccccacctccctcccggacggggcggctggctgggcagggggctgaaccccccacctccctcccggacggggcggctggctgggccgggggctgacccccacacctccctcccagacggggcggctggctgggcgcggggctgacccccccacctccctcaaaagccaatcttaaaagatcacacactacacaattccatttatatgacacactccaaaagacaaaatatagagatggacatcagtggatgccaggggttaggggtgaggccagggcgtggctacaaaaagataggaagaggaagccttttcagatgatagaactgttctggatgctgatagtgtgatggttacacaaattgatgcttgtcataaaattcatagaactgtactccaaaaggaatttaatcaaaatgcaacttggaaaataatgatgtagcggccaggcacggtggctcacacctgtaatcccagcactttgggaggccgaggcaggtgaatcacctgaggtcaggagcttgagatcagcctggccaacagggtgaaaccctgtctttactaaaaatacaaaattagcctggtgtggtggtgcacacctctaattccagctacttgggaggctgaggcatgagaatggcttgaaactgggaggcaaaggttgcagtgagctgagattgcaccattgcactccagcctggctgacaatgcaagagtctgtccaaaaaaaaaaaaaaaagatgtggtgactcgagttctcaggtagtttcttcccgcaacccacacaggccatggttcttcccctatagcaccttggaagggattagaaaagggcaccaccccatgtgcaggacgcagcctgtgccagggccctcagcctggcaaatggaggactggctgaattgcagctccacttgtgcagtgagcaacctacacgactgtccatgttgggtcctggagcccccatcttttcttctcaggttctgttattcctcaatggatggagttttgacaagcagtgcccagggagtagggatgaggtggcctgtgcattagactggactaacctggccaaggcttcttgctaatggcagcaaatgcacttagtgctgaggttgcaggctggtgctttggggacctggagcttaatggctcacctgccagggaggaagaaggatggtcggacagccagacgcatagccaggatcagatggatggagggagcaggaggacttgccccagcctggaaaccccccttcctccgagaagtgggggtggagagtgaggggatgtgcaggaaggacgctgccaaggagactggctttgcctgagcctgtcccatggcacattttgtctgctgattaatggtgaaggtatcattcctctagaggggtaggtttcaggtgggcccagccacaacctgctctgccccagggagctggggatgaaaatcaggatcccagctctttttttttttttttcagatggagtttcactggttgcccaggctggaatgcaatggcgcgatctcagctcactgcaacctctgcctcccaggttcaagtgattctcctgcctcagcctcccgagtagctgggattacaggcgcccgccaccatgcttggctaattttcatatttttagtagagaagaggtttttccatgttggccacactggtctcgaactcctgactgcatgtgatccatccacctcagcctcccaaagtgctgggattacaggtgtgagccaccatgcccagagaccagatggttgtttttgttagcttgtttttctttttttttgagatggagtcttgctctgtcacccaggctggagtgcagtggtgcgatctcggctcactgcaacctccacctcccaggttcaagcaactctcctgcctcagcctcctgagtagctgggattacaggtgcccaccaccacacccagctaatttttttgtatttttagtagagacggggtttcactatgttggccaggctggtcttgaactcctgacctcaagtggtctgcccctccttggccccctaaagtgatgggatgacaggcgtgagccaccgcacaggccgaccagagggttttgatcctgaggtgccatggttaattttctctcagtggcccctgtcagcaggcacattctatagtcacaggaatcccagaaaccggccagatgtgttcttcagacctgggggagctggagacagaatccactccagcgggcgcatgtacgggctccctctggacccactgcagtcagatgagggctcagttcccccagggcctcactcttgtcttccgccaggtgggatgtactagcaggtcagagaaggaagccagtggcacttttttcttttttttttgagatgaagtcttgctctgtcgcctaggctggagtgcagtggcacgatctcagctcactacaatctcccgggttcaagtgattctcctgcctcagcctcccaagtagctaggattacaggtgcacgccaccagacctggctaatttttgtatttgtagtagagatagggtttcaccatgttggccaggctggtcttgaattcctgaccttagtgattggcctgcctcagcctcccaaagtgctgggattacaggcatgagccactgcagtggcactttttgttgaagtgtgacacatacacagaaatgcatcccaggtgttcacttctgtgaacctttacaaagggaactcatctgtaatacccatctccaaatcaagaatagaatatagcgagctccccagaagccagggaggaccagtttttacagaatgtaaggcagccaacagggcagcttgtccctctgccattttctgtgtcctcttgcagccagcaaggggagtccagaggggaagaggctggagcagcgacccccagcactggcctccagccctcccgccctgcctctcctcaccatcaggccagcagaggggctacccaccgcctcccctgtcaccaaggagaccttgttctggatcctgaggacacatctagaatcccatctggggagccaggaaagctgggagagggagaacacagagcccctttgagccacttgttggacaccgcccaaggtctcacagcttggaagggaagacttgaacccacggctgtctccaccaaaacccacagccactgcagcagtgcaggtcattatctccattttacagaataggaaactgaggcttagagaggccaagaacaaagccagacctccaaagcaggacttctgctttgggcgaacaggaagacacaggcttccagccgaggggccggacttgaccctgtccctctacgatcaaatgccttctgtgttcccccaccctcaggaaggagcataacctccttcacagcacccaagcccaccatggcctggccctgccggcctcactgtcctcacctgttctccagcattctctgcctccagcacaccagcctttctccgtttctgccatgctcagagttccttttgagcttgggccttggctcatgtcgttccccagcaaaggctgctcttccctgcccctgccacatcctaccttcaaatgtcgctgactctgggagtcttccctggtgacccacccaccccagcacacttatcctgtcagtccccttgaatgccccccaaggtgtaagtgcacggccatacaatggtttgcttaatacgcatctagctccgagagaactgggacaggggccttcttgtcctcagttgtatctgctgtgcccagcacagtcctggcacacagtaggtgctggatgaagatgtgctgagggccgggcgcggtagctcacgcctgtaattctagcactttgggaggctgaggtgggcaggttgcctgggctcaggagttagagaccagcctgggcaacatggtgaaaccccatctctgctaaaagacaaaaaacattagccaggcgtggtggtgcacacctgtaatctcagctattcaggaggtggaggcaggagaatcgcttgaacccaagaggtggaggttgcagtgagctgagattgcaccactgcactccagcctgggtgacagaggggctctttctcaaaaaaaaaaaaaaaaaaaaaaaaaaaaaaaaaaaaaaagatgttctgagactctgagatgcatgaggctgtggctggcaggcagaggggagccacaaggagccttgagggacataagacccaataccatctccataggaggcctggggaggggcagggccttgctcaaggtcacacaccacctagtggagcctcaggattggaactcaaatcccctgctctccagcctgcagcctccctcccagatgcagcctagtgctgggaaaggagagggtggcaggctggctctgagcaaaaaccctctccttctcctgtttgcgtccctctcctttccctgcctctccccactcttcctctccaaccaggaggctgccgagccaatggctcagcgagggctggggagccctgacctgaccctctcctccctccacccagcctctgcgatctgtatgcaccactttgctaagacctcccaaacctctacaccctcgcaggctgacagggctgcaggtgccagcactgacctccctctgccctctgctcctgtccctccccttccgcaggcaccgcccccaccacaactccgccacctccagccgggctctggggtcctcctgggccacctgcttactgtgtgtccctggacacggcgtctcccctcgctgagttactttcctcatttgtaaaacggggatatgacccgtctcttagagtgactgggaagatcggtggtatcaacgcaaactacagcccggcagcttccaggcaaactcacttctcaggacgcctgtcctgctgtcttctcaaagaggtggatgaagccaccaccacccggtttacagatgaggaaactgaggctcagggagatctggaaaccattcccggcagctgggctccgaacccaggcctgcgagcacaaggctggctcccgcccccggctgtggtccctcctcctccggggcagggtccggtcgtgccagacgctcgatgacagcccccgcgggggaggccaggctgggagaggagagggcagggggcgggggcgcctgaccgcgtggggtcggccgcgggtcgatacgacggcgggatgaatgggagaggggagcgcgggcgagagggtgagggaggaggggaggaggggagaacgggagaacgggaggaggagggagaggcccgagcagggggcccgcccccgccgcccccctggtccccgccccgccgagcgtgcccggccgggtctgcagccgtcagcgccaagcgcggccccgcggctccgccgagagatcgataactaatttcaccgcggtagccgccccagtttttccccgataattgcgcgccggcagctgtgagcgaggcccccagcgcggcgcgaagcccctcccgcgccgatcaattgacaccgccaccgggcggcaggaaaactcatttttctttctctccccggctccgggtgggcgcgagctgagctctgccaagggccgggggctgcttggggccggggcggggagggagggcaggtcccggggagggggcgcggacgcgggtttgggaaagaggcttgcgaggaatccgaggaggcggggtgcctcagtttctccactctaccacaggggcgtggccgaaggcctcagggacctggggtgcgggtggggcagtcctgtcccctcttagctgttgggatggcggactggctggtgggaggaagggctaagtcaggcgccgcggcctggacgcgtgggttctactctggactcacaccagggaccactttgtgacgttgcatccgttccttcccttcgtctcttcctctccgagcctcagtttccccatcttccgaaaggggcctggcatatcctgggcaggcagatggtggatcagaggtagtgaggtgcctacaaggaaatgctcccaacagggtggcttggaggaatcctccttcctcagcactcatgggccgggcactgttctaggccgtgggggtggggatcgagcagtggccacactgacaaagcccctacccttgtggaagtgacattctactgaggccatggacacgtacagtacccaagtaagcagtgagaagatggcacgggccacggagaaaaatgaagcaaggttggcaggacagggcgtgctgtgcaaaggcaacgcagcccccaggacccacggtgggcctcgccccaggccctccttgcaaagctctgaactgctcactcccaaactgctggttgttcaaggtcatgggaaacctgcagacttggcattctccaagggaggtgggcaggaggagggagagcaagaggaaggagaagccaggaggtggggtgggacagtcttcctctgggagagtccctaagagggccagagagagagagagagagagggctggggactggaagacaccaggggagagcgggtatggtcagagctccaatggacacggtgtcctggagggtcaggtcaagagagacttgtgctgctggctgggctccagctgggccagtgaggcctagagaagggcagggacttgcccaaggccgcagtacatatgggggacagagatgggctcctagatcctgccaccaggcacagagaagggcaagagaggccagagaggaaaggaggaaagaggctcatggagcgggggcgccagtctctgtttagaggggccaggagccccagtgtgcttcccagaggccagctagagcttcccaggagcaccatgggtggtgctgggacttctacaggactcagcatgactcaaagggccctggggaatgcattctgttccccagtctcccaccctccacctgccagaatgacagaggctcccccatggaggtgagtaagccgggcaggggtggcgacccaaggctgctggggaagtggggtgttccagggcggagcaaacctcctgactctccccctgcctcggtttcttcatcttaaaaatggagctggtggggctgggcgccgtggctcatgtctgtaatcccagcactttgggaggctgaggcaggcggatcacgaggtcaagagatcgagaccagcctggccaacatggtgaaaccccatctctactaaaaaatacaaaaattagcagggcgtggtggcagatgcctgtactcaggaagctaaggcacgagaatcgcttgaacccaggaggcggaggtttcagtgagctgagatcacaccactgcactctagcttgggcgacagagagagactctgtctcaaaaaaaaaaaaaaaaaatggagctggtggtggggtgctgagattctgtcaatctttcttccctccagattcctggcatgcccagccccacgtctgggttgagagtagtgactcagaagaaaatgaaggctactgctagcaaccaaatgaggttagtgggaggactggcaggacgcggtgggctgggattccgaactgcgcatagttaggtctcacccgcctgtagccccgtctatccaaccacttaacatttactcatcgttcagcaaatatttagtgaagaccacctatgtgagaggcactatggagggcagtgggtgtaaagtcccccctcttccccatctccttcctctccccacaacccccatgtctccaccttcattttcttttgaggtatggtcaagggaggactggattgggagtcaggaatagactcaggccagctggtgacctaggcaggccccttgccttctctgtgccttggtggaccaatggtcattagtggactctgtgtccttcctgagagaggagggccctgggttaacagcagctctgggccgggggcctcacccctggatctcattcagtccccatgaagtgagatgaaggaatggagaccaagatttcacccagggtcccatagccaggaggggaagagggcagagctcaggtctgtctgaccccagagccctgcctgcttgtctgagctggaggggaagtagtgcccgtcgggagaaactttcagatcctggatagatccgggatgtggggtagggactaaggtgctcagagtccccttgtcctgcccgtcagttagtggctttggccaccagccatctcagaaaggatgttggtcagagaagcagctgccccagaaggccatgcggggtgaccttggcctcctcgatgttccctgggccagcacaggcacagaacgagcctccttttgtaaagagacgtgcactcactgggtcagcagtgaggcagggaggacagcctcacagctacgagcacgggttttttaaggctggtcaccaacccagctctgctgcctgctagcactgggcccctgggcaagctgcctcctcccctgagcctcagccttcccatctgtaaaatgggcatagtggcaattcggtagacccactgtgctagatcctgtgctgagccctctctgtatctgcacactgagccctgtgagcagcatccccctcttctataaccctcgtgcttctagtcctcgcctcagagtccagccacggcagcagttctgcgccgcctgacagatctccatgcctccactgcatccagaatgcagctctgaatgccccatctggagatgtgggatcctgcccacccaggccccagaccaagggacacagtttatggcgagggaggatcccagtgagcacatgagcgtgatgcccaccagtctcaccctggagcctgggcctgatggaacgtaggggcagccagcttgtgctacaccccgagcacagagccaacagccagtgccaggtgctgcatccccagaagctggaacacatggtccagggacaagttgtagaaataggattgcccggccaggcatggtggctcatgcctgtaatcccagcactttgggaggctgaggtgggcagatcacgaggtcaggagatgagaccatcttggctaacacggtgaaaccctgtctctactaaaaatacaaaaaattagccgggcgtggtggcgggtgcctgtagtcccagctacttgggaggctgaggcaggagaatggcgtgaacccaggaggcggagcttgcagtgagccgagatagcaccactgcagtccggcctgggtgacagagcaagactctgtctcaaaaaaaaaaaaaaaaaaataggattgcccactcccccacccaccatgccccagtgtccttgtggatttgtgcttcttgtccctgcaactttagggttgtcagatgagaggccccagctatctgggacaggggagaggggagagggggcaggggagaagggaagtacaggagggctccactggacacagcgtggatctcattgaactcaaacctgtgactacatctgttacactggggtctttctgccaaggaccaggactaacatgtaaagaaaggggtttccactcagggtgggttctaagctcttctcggtcaccttctagcatgaagtctttgcaggtactgcagatgccagcacctcaaaggggcctctgatgggtggacccagttggtggcaggggcggggctgaatgctgccaggtgggcactgtgttgagcagctcgcctgaatggcttcagacctcttggcttcacctcctaatccaggcccaggtgcagtaaacagacctcgcaggctgtgacaagctccatgtggcagaaagctgacaatggcctgccctaggcccctgtgcttgcctctcgcttccagtccggggctttgctgatgccacagtgtgggatcccccaacctccacccctccacagtaacccactcagcagttacacacgctcaactgcaagtgcaaaggcatgaacaccctacaggccagcgtttcctcaaaggcggcagagccctggaagcaatgctctctcctttcttccccttggcggatggttctgagatgcattttgtaaggcagctccggtgatcctgcgggatctggcaccccggcttccataatggtgaactcagcaatgtacgtttgcattggctttttttttttttttttttttttttgagacagtcttgctctgtcacccaggctggagcgcagtggtgtgatctcggctcactgaaacctccatctcccagattcaagtgattctcctgcctcagcctcccaagtagctgggattacaggcacccgccaccacacccgtctaatttttgtatttttagtagagacgggatttcgccatgttggccaggctggtaatttttgtatctttagtagagacggggttttgccacgttagccaggctggtctcttaactcctgatccaagtgatccacctacctcggcctcccaaagtgctgggattacaggcggaaccactgtgcctggcctttgcattggttttcttgctgctcctgttttgctctccccctccccatccctcagtcttgcctctgggagtactcgtcccaaacaagctccaagtacaacagcctttctttgaggcctgcttgcagggagcccaagccaaaacagatgttacaggctggattgtgctcctccaaattcatacattgaagtcctaaccccagttcgtcagtatgtgtctgtatttggagatagggtactatggtctgaatgcttgcatcccaccaaaattcaggttgcaacctaatctccaatgtgatggtattatgaggtggtggcattggagaggtgagaggctctgcccttactaataagattaatgtctgtatcagtccattcttgaatttctgtgaagaaaccctgagaccaggtaatttataaagaaaagaggtttgattggctcacgggtctgcaggctgtacaggaagcatgctggcatctgctcagcttctggggaggcctcaggaagcttccaataatgacggaaggtgaagggggaacaggtgtctcacacggccagagcgggagcaagagagagttgacagggaggtgccacacacttttaaacaaccagatcccacgagaacccactcagtatcaggaagatggcaccaagtcatgagggatccaccaccaaccaaacacctcctaccaggccccatctccaactctggggaggctgaggcaggagaatcggttgaacctggcaggcggaagttacggtgagccgagattgcaccattgcactccagcctgtgcaacagagccagactccgtctcaaaacaacaataacaacaacaacaacaacaacaaaaaaaaaaaaacagaaaaaagaaagaaatgatggagcacctattacccttcttgcactggttcctggggagctcagagcctattttttgaaagtgtcctgatcctcttgcaggcctttcatgtgtgtttccttcctggcttcctcctgtttttctcacacctctgaacctgctgtcaggtgaaaaatcaaggtgggcccaaaatgtaagagctcatgaatttgatggtgttggagtgtcctggacagtccagccctcaggggtggggagctgggcagagaggaaggagggcattccaggggccagggctagaagcagagggactccaggcccagagtaggatttccaggctgaggaaagagaggccgtgggtgggtagagggtccagaccaggacagggacacagggtgtatctggaggctcagtcagaaatagctccctctagaaagtaggcagcgagtcggggattgagctgcaaggaggaaggggaggagggagagaatggagggactggtgtccagtgagccgactcctatcctggcctatttccccaggggacacccctgggagactgtgatcctctcctccaggctactttcccactggtgccaggattcccccaacgccacactgagaacccaggagaagcatcacattatatgagagataagaaatgaagagagggagcaggatttctggttgacaaagagggtatttatttagggtttactgggtacagggagaagggctggatggcttgggatgcagagagagacccttcccctgggatcctgcagctccaggcccctttgggtggggtcggggctgggaacctatgaacattctgcaggggccaccgtcttctccacggtgctcccttcgtgcatgacctggcagctgtagcttctgcgggacctccactgctcgggcgtcaggctcaggtagctgctggccgcgtacttgttgttgctctgtttggagggcgtggtcatctccacgccctgggtgatgggggtaccatctgccttccaggtcaccgtcaagattcccggataaaagtcattcatgagacacaccagtgtagccttgttggcttggagctcctcagaggacggcgggaacagagtgaccgagggggtggccttgggctgacctgtgtggacagaggagggggtgagagatggcagagggagtgtggggtgttgtggagcgcctctctctgtctaaagtctctgggagggttcatggtgtggccgcctggtccacccagggcctctccttccctcctcattccctcctttccactggagccctctggagagcagacagccctgtgccttcctaggagcccttcccaagtcacctttcccaggtgtcctggcccagccctttcctctgcagcctcggtttccccgtgtgcacccagggcaggctgtgctccctccttcctggtttctggagtctgagtttggaatctaggggtctccctcacagcacacaaaactatactggcaggatgtggggagacccaagcctggcatggcctggagcttcccatcccctggggcaccaggctgtgccccagcctggcccactcagctctcctggtgaagcgtgggctccacccagacacaccctggggctctgccgtcgcccctgtccccaccagcccgaccacaggacccttcacatcggctgggttcttggggctgctcccccagactttggggcaccgcagcccccatgcccaccccagcagcctctgatgcccctggacttcacctggcagccatggagttctctgcactcccgtttactccccgctagtcaccttctgagtctaaggtgcccttcctcaaatgaaggtgggaggtcgacccatgaacagagagacaccaggccccagagatgacagggctccagggacaggcacatctctgcactaagagaccctctcctttctggtgactgtcctgggagggctgggctctgggacctcatccgttcctctgtgtccccatgccctgaagacccagcagaggccacagagctgcagcctagacccagagccctctctgtgccctccattggtctcccctgggggtgacccctgtgtccccaggcccccgtgtggccctcccaggctggatgggcatccagccctcagcctagaacctggggtcccagggactgtctctaaggccactgcagggcccctcatcagaaccagcctctgtccctcactcagacatctgccctgggagaggggaggagccctgaccccgcccaatcccagcccaggccctgggaccaggctgtgtcctgctgttggaacctgaaggcggctgctcccactgtgggggcccttcctgccattaccctgagactaacacatctcctccaggccccatggacaaaggtaggggtcagtgcttaaggctgggagggcagaggggaagaagccccagagagagaaaacacattttccagagacaggagagggtgggacagcctgggaagttagagccacttacttaaaacggtgagctgggtcccgctgccaaacacatgcgtcactgagttatgcttggattgaaacccccggggccagcacctggggccagtccaggagccgcgctggagcaggaacctgctgggagtgaggggcacagggctgcagtgtgtaggctgtgacccaggcacagggtaggggggtggccagtgtcccagtagtgtcccccagtagtgtctctgtgcctgtcccttctctgaggcaggtgctgccccagcgtgtgtccccctctctgaaactgttggtgctgatggcaacgctgggcccagtaggtcccagcaactccctgagtgacacatcccctcaggcagctgtgccgtgtggctgaggagtcctcagctggctcggacctgtccacctcacttggcctcattttaagggcctctgaaatctgccacaagtgtccccagtcaaggaggctgacttcctccctggaccaggacattgggtcattcctgactcaagaggagagtcctctgcttttatatctacccatggagatgcagctcagtctcactttgttcatgaagccttttctgatcattcattccatccgtccgtccatccatctgtccatctgtccatctatgcatctgtccatctattcatctgtctttgcatccatctatcatctgtccattcgtccatccatctacctgtccgtccatccataaatccatcctgtctaccaggcactgtgtgctggggacatggtgtggtcccccaggctctcacccccatctctcccaggccatggtcaacaaggccctcctcatggtcatgtccaaggtccttctgctgtacctggtgtctccgctggatgcgacacagggctggcccctctttccagtgactcttttccccttggggtctgagactcccctttcctcttcccctggcatctgtttctccatggcccatgcctggctgctgactccccagaccccacccagacctctttcttagccattttcacactctgtgacccccactattgcccacatggtgaggctggagtctatcccagctccaaaccctctcagctcctcaattgcctactgaccttgcccagtgggctacccaacaggagcctcaaactaatcacgtccagaggagatgaccaccttcccccagcccagctcattttctgtcttcatctcatcacaatgaccatgggcggtctcaacccctcagccagaaacctggagtccctggactcagtcacctcgcctcccacactgaaatggcttctgcgaacttagctactgcatctagacattctttttttttttgagacagagtctcgctctgttgcccaggctggagtgcagcctggcaacagagcaagactgtcccaaaaaaaaaaaaaaaaaaaaaagaagtgtcatattgatctctccctctctctcctgctatgtacagtcccatttccttttatttttttgaaatggaatttcacccttgtcgcccaggctggagtgcaatggtgccaccttggctcaccgcaacctccacatcctgggttcaagcgattctcctgcttcagcctcccgagtagctgggattacaggcatgtgccagcacacttggctaattttttgtattttcagtagagacggtgtttctccatgtttgtcaggctggtctcgaactcccgacctcaggtgatctgcccaccttggcctctcaaagtgctgggattataggtgtgagccaccacaccccgctccatttttatacatagcatcaatatttccactttaactatttttaaacgtacagctccgtggcactaagtacattcacaccgttgggcaaccttcaccaccatccatctccagaactctttcatcttcccaaacagaaactctaaacccgttaactacagtcccccattcttccctccccctcaccctgctaacctcaaatctactttttgtccaagtgaatttgcctattctaggtacctcatagaagtggattcaaatgacatttgtccttttgtgtctggcttatttcactaagtataatgtcttcaggtttcatccatgttgtagaagatttttgaaattaatttaaaaataattaacattcaaaacctattaagacctattaaaaatagtacaggctaggtagggtggctcacgtctgtaatctcagcactttaggaggccgaggcgggtggatggcttgagcccaggggttcaagaccagcccaggcaacatggcgaaacctcatctctacaaaaaattatgccggtgtggtagcgcatgcttgtagtcccagctactggggacgctgaggcagggatattgcttgagcccagcagttggaggccagcccaggcaacatagtgagacccccatctctaaaaaaataaataaaacaaataaatttacaactaaatataaaaagtgatacacaacctatttcttaaaaacaatgaaaatatcttttaataagctatgaatagaaaagtcatttatttgataggagatatttaccagaattctacaggaataatcagtctttttttttttttttttttttttgagacagggtctccttctgtcacccaggctggagtgcagtggtgggatctcagcttactgcatcctcaacctccgaggcttaagcaatcctctcaccagcctcctaagtagctgggaccacaggcaagtgccaccatgactagctagtttttatatgttttgtagaaatggggtcttgctatgttgctcaggctgatctcaaactcctgggctcaaacaatcccgcctcagcctcccaaagttgtgggattacaggcatgagccactgcacctggcccatagtatttctaaagattataaaaactcatattcatatcccccccagataataccttttttttttttttgagtgggagtctcgttctgtcgtccaggctggagtgcagcggtgcaatctcagctcactgcaacctccacctccctgattcaagcgattctcctgcctcccctcccgagtagctgggactataggctcgcgccaccacgcccagctagtttttgtatttttagtagagacggagttttgccatgttggccaggatggtctcaatctcctgacctcgtgatctgcccatcttggcgtcctaaagtgctgggattacaggcatgagacacagcacccggcccatagtatttctataagatttctaaagattctaatataaaaacttacattaatagccccccaacataataccattttttattatctgtgtctccctccacctgtcacccgtcccttgtggagacccctcgggccttccccatcccagtctctgttctgtaggcatcaccctgcatgtggctgtctcctcacccggcccccgctccttgtggacttgaattggggcaaatctagatcctctgggacctcagccccagcacagagcctgaccctgatggggactccttgctcagaagtccgtgcaggacactgacacccggtcccggcctgccaccatgctgaccccgcctccatggccgggctcctggtgtgggtcaggtcggctgccactgctggagctctcaccacagccaccccagcatcctctgggtgggtgggacgctgaaggccctcaccagtcagggcccctcagattgcagaaggggaaactcaggcccggtgtggtgtctcatgcctgtaatcccagcactttgggaggctgaggtgggtggatcacctgaggtcaggagtttgagaccagcctggccaacatggtgaaactctgtctttactaaaaaaaaatacacaaaattagccaggtgtggtggcagatgcctgtaatcccagctactccggaagctgaggcaggagaatgtcttgaacctgggagacggaggtttcaatgagccaagatctcgccattgcactccagactgggcgacaagagtgaaactctgtgaaactttatttgaaaaagaaaaaaaagagagaaaaagggaaactcaggtcccagagatgcacgtgtccgctcgatcagcttagaggatgggacaggggagagctagaggggatagcttgggccttagaatctgtgcccatgagctgagtgactcggacgggtcacctcacctctccgggctctatccccgtctgcacaaaggggatcacagcaggacctgcctatggggccaccgagagggaggttctgcccctgaaatgattatcgcctgtgggtataacatgcaccagtgaacaggctgttgtgtcccaaatgctcataaatggaccccgatgcttggtgctttgtctggggacctcccaccacacgcagagtggtggcaatggctgaggtcacacagggagttgtggcctccctagagcctctcctgggcttcttctttggaggcacttgcaccctggataagcttgtgtctcctaggggctggtttcaggaggcgatgctggctgaggtctagtgacccagggactccaggaaaggcccctcacaccttagctggagctccagggagtggcccctgcccagtgagggtgggagtggacaggtgacataggccaaggggaaaagaggaggggggggaggaggagtgggaggaggaggagggagaggcctgggcatccttcagggatagcggccaccactcctgtggacgtcctgcccctgcctccagtcctgccctaccccaaggactagggggaggtgagggagacattggccttggtgccaaatgtaagtgggggaagaaatctcaggaatcaagataaataatattttaatatgacattaagcaataaaaattaattcaaagatggacaaaatcttgacactttagttaaagtcagtgtctgtggctcccctccagggattaaccttcctcctcacccctctggctcgtctccccttggtcatcctttcccgcctctgccacccagacccccacatcccctggaatctctcaccccttacctgccccaccggctcctcaggctggaccggctgcttcctccaggggctccagggcccagggccctgctctgcgatgcagctgttgggcgcagcaggccatgggttaccacggccagacccagcagcagcaggggccagcgctgcctgaggttggggcctggctcaccaggggcctcaaggcccccctggcctgtccctggcctcatcggccctcagggtcagaggtccttgtggcctgacttgcagtgtgggctccctagagagtggtgccctggtccctctcgctggcagcagctgtcccattgcaccccagtccatgtggccccatcctcatcctctggtccctgcccccagccaggccccttccagagtccatgaccgttacccctggggttctgtcccagaggcacatctgccaactgccctgctgtggtcaggatccagggctcaactgcctcccacacctgtcagcttggccttgcccctggggccctgggtgctttgtttggggacctcccaccacaggcagagggtcagcaagagctgaggtcacacagggaggtgggatgcgccatggccccccaagaccctcccttggggctttcctttggaggcacctgcgccctggatgggcttgagtcccctcggggctggtcccaagaggtgatgcacctgacttccctccttccccacttccccgagggcgccctgggtctgtggagcatctcactggggtccagagagctgcccagcaggagtcccccagggcttgagctcaggggcctgggctgaggctcctccaaccggtcctagagggaggtgtggttagagagcaggaaacaggtttgggtttagccagaagccactcaacggttcaagtccaggaatcatgagataagaatgaaaatgctgtttaatgcaccatgttcagcacctcactgacctcacatcacacagacacacacacacacaccaaccaccccagcttcctgaaggtataattgacaaaactgtatatatatttaccacctacagtgcgatgctttgccacactgcaaaatgattaaatcaagctgacacacacgtccgtcatctcacatacttatgcttttgtagtgagaacatggaagatctaatcttagcaattttccagtatacaatacagtttttaactgtagactccatgttgtacgatacatctccagagttcattcttatagatttcactcaaaggccagtagcttcctcctgagcggtgagtgcatcatgtcatggcttctgacaggcccccgggtcctctcccagcccagcatccccgaccctctcccaacatctcgcgaccctgtgctttggtgttgagggagcagtggcagtcaggagggactgagcacctgtgctgggcggccagggccaggctcttttgctggtgctgccagagacgcctcaggtcacccaagagtctcaggttcctctccttcctccagaggcggggctggaaatgctgctggctctgctcacactccagggctgggttgaggttggtgttgggagataatgcatgtcagtgttgttttcttcatctgtgaaaaagcagtaacatacacacaacctaaaatttatcatcttgacctttttttttttttttttgagagtcttgctgtgtcgccaggctggagtgcagtgtggcgtgatctcagctcactgaaacctccgaatccctggttcaagcgattctcctgcctcagcctcctgagtagctgggattacaggcatgcaccaccacgacaagctaatttttgtatttttagtagagatggggttcaccatgttggccaggctggtctcgatctcctaacctcatgatccacccgcctgggcctcccaaagtgctgggatcacaggtgtgagccaccgcgcctggcccatcttgaccatttttaagtacacagttcagtggcattaactacattcacaatgtcgtgcaaccatcaccaccatccatttctagatttttcttttttcagagtcttgctctgttgcccaggctggagtgcagtggcgcaatcttagctcatggcaatctctttctcccgggttcaagcgattctcctgtctcagcctcctgagtagctgggattacaggcgcccaccaccatgccagctaatttttgtattattagtagagatggggtttcagcatgttggtcaggctggtctcaaactcctgacctcatgatccacctgcctcggcctcccaaagtgctgggtttacaggcgtgagccaccgcaactggctttttcttttttttttttgagacggagtctcactctgttgcccaggctggagtgcaatggcatgtctagatctttttcatcttgcagaactcaaattctgtccccattcaacaccaacttcccattcctccctcccccagcccctggcacccaccatgctagttcccatctctatatttgggtactctggatacctcctatggatgggaccatacactacttgtcctttgaaagtcctttttaaactggaaagtgctgcatgtgtaataccttcaggggcttattattattattattattattattattttgagatggagtttcactctgctgcccaggctgaagtgcaatggtgctatctcggctcactgtggcctctgcctcccgggttcgagcaattctcctgcttcagcctcccaggcagctggtctacaggtgcccgccatcatgctaaatttttgtgtttctagtagagacggggtttcaccatgttgatcaggctggtcccgaactcctgatctcaggcgatcagcccacctcagcctcccaaagagctgggattacaggcgtgagccatcgtgcccggccaattatcatattattattattaccagctgacccagttagtgtggcctggaaaatgttgtcaaccatcataaaataaatgaatccttgatgatactgagcttccaaatgccagtcttcaaattttgcactgcaactcagagggtgtaaaattaattccaatggctgcaaccagcattttgttaaagtgaggcagcccagagctgactccagctggagagcgaactgttcaacgggagggatggtgagggttcctggaatgttgcttcagttacctgaatgcgtagatatgctctggataacgatggaagatctacttcttgctggaagtttggatggaaaatcttttggaaagtgctgtcctggaacacctggcccagctgtcaaatcccctctggtatttccccagcggctgatctgctgtcacgtttgaagccaccctttgccttaggtcctccatatccctgtccacgcccccgggtgtgtccctgggggcagtgccatctgatggcttgtccagcgctgtgaggctctccccagcttccctaaagttgagtttcatcctggagctgggccatctcacacatccccttggcatctgccagccatggttgtgggatgctgtaacagacagacagagagacaaacagaagacttcacattatctcatagagatcacgagagccatagtgagctcaggctccatggactgatgctcagatcccagtgtcccatgaacactgagagtcccctcagcgccaaaggctgcatgccagacagctcccgatcctcggggagatgggcaaggtgctgagcagtaatgggatgtggacaccctaagaaacactgatgcaggtagaggggaagcccctgggaggccccaatccagtctagcttctcccctgttgggagccttggtccactgctgcccccgaccctggctcctctcaccttcagggctggagcagcacctgcactgggggtctgggctgaagctgctccctccccagcaccccccttgagtgtgacactcatcactgcctgggactcagaaactgtggttcccccaaggacagccccaggtctcgggagaggaagcgactgttttaaatagtgcccccagccgctccctttcaggccctgcctgaccctgcacctgccatggcctctcaacagaggcagcctcagaccacatctttctgtggcgggaaatctgggtctggctggatcctggggaccctgcggggctgggctgggccgggcctctccagcaggtgcagctgcagctctcaccacccaggctcacctcaccccttcctggactgagatgtgtccaggcctgggcagaggaggctgggccctgctgtcctgctcagtgccctccctttttagggtccctggtgcctctgcagagccctctgggtcctgcctggctgtcctctctcagagcacaggtgactgccccatctagtcacctctgccctgctcccgtgtttgtgggtgtcccccattctggcctcctgctggtcagtcccctgcccactctctatgccccaggcctcaaagactccgcctgcaccaccaaggatccctctctctcaggctgtctccagaggaaatacaggaccattttcctcaggaaccagaagtgaaggttctagaaactctcaagttttcagggtcactggaagtgatctctgttattttggcagcttcaaaatattcttcaaagcccagaagtcttgaggtttccttggacatgaggatgatgatgtacctaccattatttacggccagggtgatgtttaattttatgtgtcaacttggcagggccacagtgccagatatttggtcaaatattattctgatgtttctgtggcattattttgtgggtgggattaacatttaaattttacatttcacaaacttgtgaaaattaaacaacagtcttttttttgagacagggtctcactctgttgcccaggctggaatgtaatggtgcaatcatagctcactgcagcctcaacctccagggctcaaggaatccctcccacctcagcctcccaaagggctgggatttaagttaccagtttccctctatgtgctgatttatctgtatcctacaaatttttatgtggtggtctcatcattgttcagtttaaaatgttacctaattttgtttcttgagttccccaactgttggcttattcagcagtttcttttctctctttcttttttttcctctctctctccttcctttcccttctttctctccttccttccctcctttctgttttagagacagggtcttgctgtgtcagccaagctggagtgcagtggtgcaatcagggctgactgcagcctccaactcttaggctcaagcgatcttcccacttcagcctccgaagtagctggaactagaggaacatgccaccacacctggctaaattgtgttacatgttttgttgagagggtcttgctatgttgctcaggctggtctcaagctcctgaactcaagatcctcccgacttggcctcctgaagtgctgggattacaggcatgagccaccatgcccgcctagcagcgtatttcttaatttccaaatatatgaggaggttctagttatatatttggttgtgggggatattttgtgggttttgtgggttttcttttcttttttttgagacagtctcactgtcacccaggctggagtgcagtagtgtaatcatggctcactgcagtctccaactcctaggctcaagtgatcctcctgcctcagcctcctgagtagctaggactacaggcacatgccaccacacccagctactttctcttttatttttataaagacagggtctcactgtgttgcccgggctggactcaaacttctggcttcaaatgatcctctcgctttggcctcctaaagttctgggattacagggatgagtcactgtgtgcccggccatatattggttattgatttctagtttaactgtatgtatttagggtgcatactctgaataatttcaattctttcaaatctgccttatggagacttgttttgtaactcaatagatagttactttttgtcaatgattcttgtctgttttttatctttgaagagaatatgtactctgcaacccttgaatgcagtgttctatatgtaagtccattaggtactcattattgtctttcaatcttctatttatttttgttttttagggtttgtctgctgagaaggaatcatctccctcagggactgtgaatttatttgtccctgtagctcagcagtttttggtttcatattttttgagaccacattattagatgcatacaaatttaaaactgctagtccggctggtagcttacgcctgtaatcctatcactttgggaggccaaggcagaaggatcacttgagcccaggagtttgaaaccagcctggggaacatggtgaaaccccatctctacaaaaacattaaaaactagctgggcatggtgacttgcacctgtagtcccagctccttgggaggctgaggtgggaggatcatctgagcccaggaggtctaggctgcaatgaactgtgatcacaccactgcactccagcctgggcaacagtgtgagaccctgtttcaaaagaaaaccaaaaaacaccattacctccctcatgttccctgatgaggtttttgtttgtttgtttgtttttgagactgagtttcactcttgtcacccaggctggagtgcaatggcagaatctcggctcactgcaacctcctcctcccaggttcaagtggttctcctgcctcagcctccagagtagctgggattacaggcacataccaccatgcccggctaattattgtatttttagtagagacaagggtttcaccatgttggccaggctgttcttgaactcctgacctcaggtgatccactcgcctcagcctcccaaagtgctgggattacagatgtgagccactgcgtccagccgaaataaaacttttattagcataaaatagccctatttattccagatgacaccttttaccttgaagtttcttttgtctgatatctatataactacaccagttttcctttgagtaggaatttcacggtatctttttccatctgtttactttcatagccattctctaacctagcccaccactcctgcacacgggagctcttctctaaaagacttacctgtgcccttatcgtgcaagagtcatgtttgttttccttgcatttccaacagtttagtcgcatctctatgatgggatttctaggccttttctgtgcagtatctggggctgggatagcactgccgggtgcccctccccccatgcttccagggtacatgtgcaatgtctgttatagaccatgtcagagagccatcctgtgggtcccagacacccaactcaaatggcctcaaacaaggagggagttactgcctggcataaccgggaatctggatgtggggcacctagggtcacccgatcccagaaccctgcttccatttctgtgggtttctccctgccctttcccccagttggctggatttactcatgggaagccttatcagaccaaaattcgaagggagagagaagccttctccatcatccaggcagagggacccatccctgaggaccaggaccagggacggggcctgactgccttccctggggcacagagaagggagggagtggtgaaggcctcaggcctaggacaggcagctgaccaccaccctcccctccccaccatccaggccagggacaatctgagaaccaactagcaatccagcaatgggacacattcagcagaaccctggaaggtgccccaggaaccaggcccaaggcctctaatgtcagggctcacagaaacccaggggtctccccaccgtgcatgcagtgtgacaaagactctctccttgaaaaaacttgagccaggcccctctaagccttctccactaggctttgaccttgagcttcagtgcccaccttaattgcgtctgcactgcacagttttagcaagattcctgctaagtgggtttagccatagtcacctaccctcaacatctgatcaccttccctatctgatcaaattcccaatcccccaggtgacatctggtcaccctggcctgccttctgaggaatccccacttgcccatgctatattcgcatggagcccagtctcataccgaggcctcttctccacagcagtagttcctgataaaatctattttgacccttttgctactgtccagttctggttttctttttttctttgttttgagacagagtcttgctctgtcacccaggctggaatgcagtggtgcaatctcagctcactgcaacctccgcctcccaggttcaagcaattctcctgcctcagcttcccaagtcgctgggattacaggtacccatggccacacccagctaatttttttgtatttttagtagagatgttttgccatgttggccaggctggtcttgaactcctggcctcaggtgatccacctgcctcagcttcccaaagtgctgggatcacaggcatgagccactgtgcccagcccgagctctgattttctataacaagttgggaaggcgctcagtgggagggttcagcccacagcagagaagtgtattcagaatctcttccttcttgcaggtcacacctgagctgccctcttcctgagaacagagagagcttccaggcagggggccctactgtctgcccagcaggtgcctagggccaccatttaagagggtgctcactctcaggtgctgaccctgtactcacacaggtgcctgctcccctcactctggtcctgggcaggcccagcccctctgcatctgtcttatggcctccaaccgaacaggcctgtaatgagtgatggctgtcacttcctttctgccacccgggtatctcacaattttttttagccaattctgaccccaaatcatatggagaaggggactgtaggaaacttagttctagtttagccaggtggatacagggcaaaaccactccagcccacctttgtcagcgtggcatttctgcacacttcctctaaccagattaacctccaaataaagccactagcaacatcatgcttctgccgaacatgatgaaactaggctcatataacccaaacaagctaaccctcccagaaaaggactcaggtctatagatcacttcatccatcttcaggtgatgtttattactctcccagctgacacacacacacacacacacacacacacacacacacacccctttgatattctataacttagatatcaaaataggttaccagccaggcgaggtggctcatgcctataatcccagcactttgggaggccaaggtgggcagatctcttgagcccaggagttcaagaccagcctgggcaacatggtgaaactttgtctctacaaaaaatacaaaaattaaccacacgtggtggcttgaacctgtagccccagctacttgggaggctgaggtggaagaatcacctgagcccaagagctcgaggctgcagtgagctatgatggtgccactgcactccagcctgggcgacagagcaacactgtctcattaaaaaaaacccaaaaaacatacatatgtacatatatatatatgtgtgtatgtgtgtgtgtatatataaaataaaaaatatataaatgttcatatataataaaaaatttaaaagtaggtcacttattaacataagaatgtattaatcacagggaaatgaggaggagaaagtgttactagtgttacgacaaatgcaattacagtcatgtcaaaacaaagaagaaacatcctcactcttgagtgtcctcctttctgtcactctcacatggccgcagctggtgctgactgtttctactacccactgggtagtctctgtgccctcagcagataccttggtgttacctgtttggtgggatgactcaaacccttatacctgagggtctgggccattcacgctcctgcctgaattacatggctgtagtttgcagtaactgttaccacaggacatgaagggaccccgaggctctcagtgctccagacataccctcccttcatccctctgtgtagcagtgccccagtaccctgatagtttggctcgatccccggatgtctattgttctctggcataaggagcccacagtggccagggaggcagcctcttgtggaattggtcgaaggtttcctctcttgggaattaaagcctctaaagcaacagagcccagagctgtgtggacgggaagcaccttctgtttgttgatttccagagccatgaatcctggctaggggtgaggtgatgccacataatggctttctggttgcattttagtgattgatttctagcatcgttgcattgtactacaaaagcataacctgtatttcagccctttgatttttttttttttttttgagacggagtgttgctcacccaccctggctgaagtgcagtggtgtggtctcagctcactgcaacctccacctcttgggttcaagcaattctcctgcctcagcctcacaagtagctgggattataggcatgcaccaccacacccagctaatttttgtacttttagtagagatggggttttgccttgttgcccaggctggtctcaaactcctgagctcaaagtgatctgcctgccttggtctcccaaagtgctgggattacaggtgggagccactgcacccagccagccctttgatatttggggacacattcttttttgttttgagatggagtctcgttctgtcacccaggctggagtgcagtggcacaatctcagctcattgcaacctctgcctcccaggttcaagtgattctcccgcctcagcctcccaagtaactgggattacaggtgtgcaccaccacgcccggatatataaatatagatatctatttagatacctatatatctagagatgggggttcaccatgttggccaggctggtcttgaactcctgacctaaagggatccgctcaccctgccttggcctcccaaagtgctaggactacaggcgtgagccactgggcccagcagggtacatgttctttatagcctggcatatgtgcgcttttgttccatatctgcttgaaaagaatgtgccctgcactcggagcatgctctgctccgtggatggcataaggctgtctactgtcttcctcaaaccttctctagccgttctcactcatggcccacttattccactaattacagagatgtgtaagaatctgggagcatctctacatctataggcatcccacagctggaacggggctcccctagacagttctggccttcaggcctgcggaatggttgaggcaaaaggaagaaaaagacactgagtcccaagcagagatgtggggtcctcctcccccagttcagcttgggccagtctcacagcaccccctggtggcctcccgctgcaggtcacacacttacactctcaaggactgcactggagcttcagacaaggagggcactcttccaggccctgttcttgctggatgggtcaggtctcttcctctccctccctgtgactcccctttctccaccgactacaaggaaatggtctcctgccagccttctcgctgtctgagaacgtgaaatggcaaggtctcctgttgagaccttgaactactccaagcgcttcccacttcacttctatgaagtgagcttccctcaaaatttctgctgacctcatccacgaaacagggaagaaacccaagggcaggttgagcctcagccattgtgaggatctatctgaggcgtagggggtcctgtcaggagctaggttgtggagcacatgggctcagggaaaatcacagctggggtgcttgcgaaatcattgtttttaggaaatacgtaaatacaccaggcgttaaggcgacatgaaaacataacaatgagaagcaagaagaaaatggttatggttggacctattttctcctttcccacgaaccaaagggctggctcaaaccccaaatttggccttcttccctggttcagctgcacctgacacccagaatacagcacagggctgggggaggggtgtggagggggagcaggccctctgcttcccatgttacagtagctaacatgggaataggactcccccaaacctccagcccaggctccttctgtggctacgcgaggggtgtttcccgaggcacgtccttccctccagcggaaggcatgttcagggaacacaggaacgcaatggggctggagcatggagggtccagagacgggagccagatcaggaagggcctgcaggctggccttgacattctggtttacatgggactcaatgggggtgtctgaggaagggaatgaccccatcaggctagcagggtagaaagcactctggctgccaaaagcagaacaaatacaagggcagtcaggtcaggaggctgtgcactgggccagcagagggatggcagcagcctcaggtaaggcagagtaatcagagaggaggtggcatccagtgatatcaaggagcaagactgggggggggcggtccatgaattagaaggtagaggaggagtgggtttttgaatccaggcttaagaggagaaaaggacaggaagtagggagagagctgataagcaccatcagtatgcataacaggcaagagaaagtcacttgttcacacagcaagtgctgctgggtggcctactccacagcctcttcaggggcagagcccacccctccagggcccagtctgcacagtgggaaaggaagatgggcagagagaggctgatattgggcacctctggggcgggccactaatagaagggagaggcttcaagctttaagataagacttccagccaggtggctcacacctgtaatcccagcactttgggagcctgaggcaggcagatcacctgaggtcaggagtttgagaccagcctggccaacatggtgaaaccctgtctctattaaaaatacacacacacacacacacacacacacacacacacacacacacacaaaattagctggcatgatggcacacacctgtaatcccagctactcgggaggctgaggcaggagaattccttgaacccgggaggtggaggttgcagtgagccatgatcgtgtcactgcactccagcctggcaacagagtgaggcttcacctcaaaaaaaagaaaaaaaaaacgaaattattcctgaagaaacacaggtatcagacttgctagacaaagaccttaaaaccatcttaaatacgctcaaacagttaaaggaaaacatggacaaagaactaaaggaaatcagcaaaattatatattaataaaatgagaatatcaatatagagatataaaaagaacctcaacaaaaattctagagctgaaaaatacaataactaaattgaaaaattcagtagaagaagtcaatggaaggttcaagcaggtagaagagagaatgaacaaacttgaagaaagtacatttgaaattactttgtctgaggagcaaacagaaaagagcaaacaggccgggtgcggtggctcatgcctgtaatcccagcactctgggagtgctgaggcgggcagatcacctgaggtcagaagttcgagaccagcctggccaacatggtgaaatcccttctctactaaaaatacaaaaattaggccaggcacagtggctcacgcctgtaattccggcactttgggaggccaaggcaggcgaatcacaaggtcaagagatcgagaccattctggtgaacatggtgaaaccccatctctactaagaatataaaaattagctgggcatgatgtcgcgcgcctgtagtcccagccacccgggaggctgaggcagaactgcttgaacctaggaggcagaggttgcagtgagccaagattgcgccactgcactccagcttggtgacagagcaagactccatctcaaaacaaaacaaaacaaaaacaaaaacaaaaaaattagccgggcgtggtggcgcatgcctgtaatcccagctactctggaggctgaaggaggagaatcgcttgaacccgggagacggaggttgcagtgagctgagatgtcaccactgcactccagcctgggcgacagagcaagactctgtctcaaaaaaaaaaaaagaaaagagcaaacaaaggtgaaggcatcctaagggactatgggacaccatcaagaggaccaagatacacattatgcattcagcaaaggagaagagagaggaaggaacagagattatttgcaaaaatgtccaaaaactatcccaaattggagaaagacgtgaaactacaaatcaaagcagctcaatgaactccaagagaattaaccacaaaaagatccacaccaagacacattatcatcaaactggcaagtgacaaaaaatcttgaaagcagcagccaacaacaacaaaaaaaagttggctgggtgtggtggctcacgcctgtaatcaaagcactttgggagaccaagggaggtggatcacctgagatcaggagttcaagaccagcctggtcaacacggcaaaaccccatctctactaaaaatacaaaaaattaaccaggtgttgtggcaagtgcctgtaatcccagctactcgggaggctgaggcaggagaattgcttgaacctgggagacagagatagcagtaagccaagatcgcaccactacactccagagtgaaaccacgcctggctaattttttgtatttttagtcattgttgaagttcaagggaacaagatgtatgacaagtgactactcatctgtcagagtggcagggccactgaggatgtgacagtcattcatccactctgaaacaactcttcaggatccctaacatagaaacgaacatctggcctttacatgctttgataaacaggatctattcctgttaaagcagaggcttcgttcatctccaaagcttgtagaggaacctcagacctgggccagagatcctcagagggctgtggtttcagggcctggaggtgacacctcccaatcacacagacattgcaggctcagagggaggagcccctttgaaagaggtgagcagagtctggggcatttgtgcaaatgttgatgaagtccccagacaactcgcaggctcccaggaaaccctaactggggaagaaaagatgaggataagcagagcccaccatgggtgagaagagaggaaagccagggtctccaccacccaggtcctcagtgtccctcctccgtgtgcccggccctgtcctgtgggtggagggtgaggagagggagagaaggaagggttggcagtttcataagaactggacctcctcctatgagtagatgaaatagtttaatgagattggttttggattttccagcttccctagaggccggaatcagactcccaatataagctcttggtcgctgtggtgaaagttcgtgtgtattcatcccctgagaaggttccctaacccttactgtgtcttctgtgtgaggagtgcagctctaagcactcagggtactgtttcccagtgaatcttaatgaaatgtttggagaatttttatttcctccatttagcctaaccagaacagaaacgtcagctctagaggtagaacaggtcactcagagtcacccgagcaatgactgctgcatgagctgctgacttgaggtctaagtgatgggaaagttcacctttctgcctagttgcctctgaaaatgtatcctaaaattaagtaaacacattgtttatagctaatctttctaggtggcttcataaatcaataaacagacacacattttccatgtgcagatggtgtgcaaagttttgggggtcagaccaactcaggaggctgcccctgaggagataggaaaggtcccctgtccattaatgagtggccttggccagacttccaaccatggtgagggaggaaggggggcatccatagctccttctcctccactctcaggaaaccctaagccaggaaataattctaaagagatctagggaggaggaactgagaggacaagttgactcagacaggaagaccctaggactctccatgggggacgttcataactgagaagcatcattgctggccaggggactggaaaacacatcatcttacatccctgcattcccgctccaaatgtctgaaatcccaggaacccacagcctgtcttctcaccggagctctcaggggcacttctgctctctaggagatagaaactgtcccttcattatcacattacgtcatttttgctgcacacagagtcttccacagtgggttctagtcatttctccgtgtttcccttcatctcctttctgtctcttctgagagtctgattccatctagcacctcttctctttcctgtgaggccagttctccccgggtccaacctcaggggtgcagttcaaaggttgtccccttcctcttccccttccccttttgacagagtcttgcatccaggctggagtgcagtgacacgatcacagctcactgtagccttgatctactggactcaaggaccctcccacctcagcttcgcaagtagttgtgaccacaggtacatggcacccccgtttatttttatttttatttgtgcaaaggggtctcattttgtcgcccaggctggtttaaactcctggcctcatgccatcttcccaccgtggcctccccgctctgcattttcttctgagcgctggtctcacagcctcctacaagtttggtgtgctttgtttccattttcatttatctcaaagaatttttgaacatcacttgtaatttctgctttgattcattgattgtttaggagtgtgtttaaatttttatatattcctgaattcagattgcctttgttattgatttctaccttcattctattgcagagaagatactttgatttcagtgcttttaaatcaatgagatttgtttcatggtctaatacatggtatattccagagaacattccatgtgtgcttgggaagaatctgtattctgtgagtctgttgtagatgttgtcaggtctagctgatttatagtttttcaagtcctctacttctttattgatcttctgtctcattgttctagccagtattgacagtatagtattgcaactattattgcgaagctgtctgtttctctcttcaattccatcagtcattacttcctatacttgggggctctgtggttagacgcacatgtactaattgttacatcttcttgatgaagtaacttatttatcaatatataatgtccttctttgcctcttgtaataactttcattgactgacccatctttcttttccttcctgccttgcctccttccttctttccttcctccctccctccatccctccctcatttaaactgttggcaggacacagtggcttacatctataattccagaatttgggaggccaaggcaggtgaagtgtgtgaacccagaagtttgagaccagcctgggcaacatggtgaaacccagtctctacaacacaacacaacaaaacaaaatctaaaattagccggtcacctataggtgcagctatgcggccactcaggaagctaaggtcagtgcatctattgagccctggaggtcaaggctgcagtgagccatgatcacaccactgcactccagcctgggtgacagaaggagaccctgtctcaaaaaaaaaaaaaaaaggaaaaaagaaaagaaaagtacataaatacacagataaactgttggttgggagccgtgtatgcgccaggcactaagctggggatgagatgggatgaagagtctggagacttgggaaaaggctgcatctctgggaggccacagcttttccttagtcaaagagggtcctggaaggggtaggtaagatcccttgaagccaggtcctccagagctccaggacccaaggtggagctcagggtgtgggaaggcagccagggggcagcatcaggcctggtggggggctggggctgggagcaggtgggatgtagggagagggctgttccaccgtcacctgtgagctgcatgaacacccagtgcagccctgaaatacgctccccctctccctggccacatctgtcttgtttttctcctgtcccacatcccacgcggcagccttggcttctccttgccttagttttttcccttgtcaccctgagttctggtttaggtcagtgttaagattaaccttagcctggggattcccaaggtcagccagctgcaggcagggccaccggagctgggaaggtgaatcccccacccccatcccttggcctggcccccaccctactctcacctcagacctcgctgtccctccaggcctccctggccaaccccttcacccaggaagctactggtttcctgaatggctggtcctcaggtccctgacccagcttctccttgaccagagtgaaggctgggcccagggagggaaaggtacttgcccaggatcacacagcatgtcacccacaggcccaggcaagaactgaggagagaacagcaatggctgggggtaggtgagggtccccgtgggcctggcactccctaggcattctcatttaatccccaaaacaaacctgtggggagagactgttatcacccccgtgtacagaggaggaaactgaggcccactgaagggagtcaaactgcccgaggtcaagggctgctgagggctgagcttgggcgggaccccttttctgtctcaccctgtggctggggctcccacagcagaggctccacttggaagaacacgctctgggctcctgcaggcctttgccagctgccctccctcctcctagccgttcaggggaggggtggccatcgggctctgtagccctgactcggccttactctgctctgaggcctcttttctgcatccccgaaatggggtcagagctggggaatggtaaagggaggtcaccccacctgagcatatctggtgcctggcagagggcagtgctccatacaggcgccctccatacaagtgtgttccatacaggtgtgctccatacaggtgtgctccgatgtgagcttgggcaggccccttcctctcctgatctcggtttccccatttgtcagtgagaggctctggcctgaaagtcaggacacccctgagctagctctgcctcattctttgggatttaactgctctaggcctcagttatcctacctgttaaatgggaccaagatcctgaccatgggccccacagaatccatgagtggctcagctggacaacacgtgtcccatattttataaatggtacagggacaataaggccactcaatagcgtctcaacacaggcacagctgcctttaggagttgcagatctggccagatctgaggcattcagggcctttattctcagccttgttccctctgggccctgttcctgcccctctgcagggctctggggcttaggacacgtcagcctgctggcccagcccagtgtgcgtgttcacagacctggtctaccgtccaacccagagaactcctatgcaccccgcagggccctgccctggacctgcctccctgcatcctctgcccattcagtcttctttaccaggtggtcactgcctgtgtcccattcagggcccagacctgctctctcccttgtcccctgcccctattaaggcctggcccagtgcagggcccagccatgcggcagaatggaaggaatttttgggtggtgagcagggtggcagggcacgtggtatggcagacaggttctagggtctctgagatgatccctcagggtgcttttatgggggcccatgtgcacctgccatatccctgttgagagaaggggcgctgaggtcactcctgtgcctttgctcacacccatcttccagcatgcccttcctccctctgccctccagccctggttcaagctcccaggcctgtctgaggttgccactgcccccaggccacctttgctgacatgggatccccagtatcccctgcccctcatcgtcttcacagagggtctcatctgcagcctgagctctgtactgggcagggacaagtactcccaggggaccccagtgccacagcccccttctcccacggtgcatgatcaggcacacttcaggtctcacctggggctgggctaggttgatcccgctttgcctgggacatcaggagctgagggtctatataggtcaggccccaggaggtgtcagagggtttgtggaaggatgggtgtgtgtgtgtacggacagatatatggatggacagactgatggaaaaacggataagtaactgtccagtctgaagtcctgtccatgaaggagggaccctgggaggcctcttgggggcagctgtgcttccaggtactttgtcactacccaagaccttagggtcccagggcagcaattgaaagggtccccatttccctttccctccctgtaactggccaagccccctgaaatgtctgaggtttggaagcagcaggtgggttgtgaccttcagggacccacttccagcttcagccaatcctgcccaccctgggtccctctgagctctgagtgtctggctgtgccctacagttggccatagctctgcacctagcattttgaacagttcctggggatccctgagaagggggtagggcctgcatgaacagaagcttctggagcagaagatgccgcttctgtcccttgactgactgtgatcttgagaccctgtctagctcaggtctgggcacagggcctgggcacctcggtgctggatacaggcccatttcccagctgggctggtggaggcttcattaaccgaaccctcccctaccctatgtccccacccccactagcctcccctctaaaaacgattcggcaattttttttcttttttttttttttgagatggagtctcgctctgtcgcccaggctggagtgcagtggtgcgatctcggcccactgcaagctctgcctcccgggttcacaccattctcctgcctcagcctcctgagtggctgggactatgggcacccgccaccatgaccagctaattttttatatttttagtagagacggggtttcaccgtgttagccaggatggtcttgatctcctgacctcgtgatcgacccacctcggcctcccaaagtgctgggattacaggcgtgagccaccgcacctggccggcaatttctaataaacatacgcttatgcatatcaagcaaactctactcctaggtttttatccaaacggaatgaaaacttatgtttaaacaaaaatttgtttgcaaatatttatactggttttattcaccattggcaataagcagaaacatctggtttgacctaacgcacgcgcgcacacacacacacacacacacacacacacacgtggaaacagcccaattgtcattcaactggtgaatggctaaacacatggtgataccttcataaatggaatcatactcagcaacaacagggaacaaactattgatccataaggcaactgggatgaattacaacattgttacactgaactcaggaagccagactcagaaggttacatacttagactcctagtcagcattaaaaatgaacaaactaggttgcaattgagccacctggaggaacacccagaaaactatgctgagtgggagaaagccagtccccagaaatcacatactgtatgattccatgtgcagaacattcttgaaataacaaaattacacaagtggagaccaaattaatagttgccaggggctaaggaggggtttgggacagtgggaagtgagtgttcctgtgaaagggcaacatgagggatgtttgggagggaagtgttcccttcttgctgtatcaatgtcaatctcctggctgtgatccgttactgtagctgcaaggtgctaccgttgagggaactggccggagtacctgggatccctctgtatgattcctcacaactgcatgagaagctgcaattatctcaaaataaaaagtttaatttaaaaagcggtcacatcctttacgtttgcatttctgtgatattctgtaaaaagcaacagtatagggtcagaaagagaccagtggttgccgtggttggggtacagaaagggtttgaatgtaaaaggaacgtaagggctgagagcaggggctcacccctgtaatcccagcactgtgggaggctgagagcaggggctcacccctgtaatcccagcactgtgggaggctgagagcaggggctcacccctgtaatcccagcactgtgggaggctgagagcaggggctcacccctgtaatcccagcactgtgggaggctgagagcaggggctcacccctgtaatcccagcactgtgggaggctgagagcaggggctcacccctgtaatcccagcactgtgggaggctgagagcaggggctcacccctgtaatcccagcactgtgggaggctgagagcaggggctcaccctgtaatcccagcactgtgggaggctgagagcaggggctcacccctgtaatcccagcactgtgggaggctgagagcaggggctcacccctgtaatcccagcactgtgggaggctgagagcaggggctcacccctgtaatcccagcactgtgggaggctgagagcaggggctcacccctgtaatcccagcactgtgggaggctgaggcaggtgggtcacttggggccaggaatttgagaccagcctggccaacatggcaaaaccctgtctctactaaaaatacaaaaattacccgggtgtggtgacacacacctgtaattccagctacgcgagaggctgaggcaagagaatcgcttgaacccaggtggcggaggttgcagtgagccgagattcacctctgcacaccagcctgggtgacagagtgagactgtgtctctaaaaaaggggtgcttagagaaatttgggggggggtggaaatattctgtatttcaattgtgatagttacatgagtcaatgattttttaaaaattatactaggttttattagctacaccaaaaagagtaaactttaccataaagtagaaatgtttcaaaagtttaaatgttttaaaatgtttattatgtcattacagttgtcaaaaacatatttatcttaagtgtttaatgttccctaccatggatataacatagtttattttacctccccctaacattcgacatttaggctgtttccacttttccctccatgaacacatttactttttttttttttttttttgagacagtctctctctgtcgcccaggctggagtgcagtggcacaatgttggctcactgcaacctccgcctcccaggttcaagcgattctcctacctcagcctcccacacattaagaatttttagctgaagttttatccccccaaaacaaatttctcgaagtggaatgacttgattaaaaggcatgtacatttttatgatttttcatacatgtttctgaaatccagtctccctcgggcagcccccgagaatgcccgctactccccatcaacctctggtgcccccaattcagcttcaccctcccatttcacagcaatctgggcccctgggtggcttaaacctgtgcctcctccaggttcctcacctcccctggacctggctacccccactctccgccctgggcctccctcctctaatctgctctacaccagcctctcatcagaagcacacaaatctgatgatcagtctcctacccaaatccctccagagactcctcctggatctgaggataaaggcgggccacaaggaccctgtggtctgtcagcctctccctccgtgtcccccaggagctccccgccacagcccttggtctcctctccactggcactgctgcctttgaggggcgcccagcaccagccagtgctgcttgatctgtgagaccagtactggcatccccccactgcagaggggggaccccctccccctttattgctccaaaaatgggccatgatctgtcctcctgactgcacagtccccctgcgtttggcccaccctccctgtgtcccccagcctggcccctagtaagcctttatgagcaagacgatgagtggatggccttgggggagacgaagccaagcccttgctgccttctggggacactttgcagaccaccacttcccttgggcattttgtttaaaatacaggatgtgctgacatgatcccagtgttaactgttcatcaaaaaagcccagggctgtccttgctcatccctctcctgttcccccttctcctgaatctgtcctcatatcagtcaaactgcctgggtcaccacaacaccctccatggggtgtctctagttctggattcacacccctgcccacccatccaactctggtctcatcgattccctgcaaacagcctccaggactccccagatgagtctgtcctccagggatgagttctctgggtctgggcctggcacctgtctagcctgctctcagaccaccttggccccaggactcacttggtccagccctgtgggccgcctggagcttctcgaggctctatgcctgggagtcccctgccaggtgtcccctgcacctgtcactcatcctctgtggagacccctcaggctttccctgtcccagtctctgtcctgcaagcatcacactgcatatggctgtcacctcacacgacaccctcattttgtgtgcttgagttggggtaagtctggttcctctgggacctcagccctggcacaaagcctgacgctgatggggactccttgcctagaagtccctgcaggacactgagaccctggtctcagcctggcacccactagttttaaccctcccctgacagagggactgctggactgctggtgttgcacagggtcagctttcctcgtggaagccctcaccacggccactgcaggggtagggcatcaggctgcaaggccctcaccaatcagaaacctcactttgcagaaggggaaactgaggctgcagaggtgcacatgtcagctccatcagctcaggggacagggacagggaagagctgcagttggactagctaaagccttatgactttctcaatcactagagctgctaagctgacactatctttattacctggttcctctcagagttgacatttggaataaagtacatggccttccctttatttctgtgaaatgacatcttgatctagttgtcccagtccactgcatttggtgcaattgtccaaggtactcatgaactctgccagctctgcgatatgagctgagtgagttgggcgggtcgcctcaccactctggcctctatctctatttgtacaatggggatcacagcaggacctgactatgaggtcactgagatggaggttctgtccctgaaatgattatcacctggggtataaagttcaccagtgatgaacaggccattgtgacccagaaggttgtaaatgaacccagatgctcagtgctttggggacctcccaccacacacagagggcaaggactggggtcacacaaggagaggggccgcaccatgtccccccaacaggtcctccccagggcctttccctcagaggcaccagcaccgtgtaggcttaggtttcctaggggtcagtcctaggaggtgactctggctgaggtctagtgacccacagaccccagggaaggcccccacaacatcagctggagcccaccacctggtgctcggggaggtggcccctgcccagtgggggaaagggtgtggaggcggcacatacatagtgggaggaggaggaggagggggagaggaagggagaaaggaggagcctgggtgccctgtggggacagcggccaccatcctctgtggacatcctgcccctgcctccattcccacccctgcctccattcccacccctgcctccattcctgccctatccagaggactggggggaggccagtgagatgctggccttggtgccaaatttaacaggggccagaaatctcacgaatcaagataaataatattttaatatgatatttaaaaataaaaattaggccgggcacaggttaattatgggctcatgcctgtaatcccagcactttgggaggccggggtgggtggataacttgaggtcaggagttcgagatcagcctggccaacatggcgaaatgccatctttacaataaaaaaattagccagccattgtgtgcacctgtgagcccagctacttgggaggctgaggtaggagaatcgcttgaacctgggaggcgaaggttacagtgagctgagttcacgccactgcactcccgcctcaaaaaaaaaaaatttttttttttgagtgagaccccacctcaaaaaaaaaaaattaattcaaacaagttcatgatggacaaaatagtaaccctttagtgaaagctagtgtctgcccaggcccctctaggggttgatgttcctcctcaaccctctggcttgtctcctccacaggcctccacattccataaaatctctcaccccttacctgccccacaggcttttggggctggactgaccacttccctcccaggcttccagctccagctgggaggagccaggtggggcctgtttatgggggagccttgcctcattgtacttctcccagtacctgtacccgagctgtgccatgtgatgccccccttcccatagagccccaggtcccttcaagaccccttggccagagcctatggcttcccattggcgtcggttggggcgcagctctttttggtgtgtgagacactggcctccactctaggtcttccatctcggagtcgaacccaagctcttctcaaaggctggtctgaccaggcgtgagtctccaactcctttgaaatatttggggtgggaagcgggggctttcttggctcccctactctggggcagtggtagggaagagcggagggtctcctggtgtgcctgggccccacagcagtgaggtgcgggatctcccagggctggctgctgcctctcaggccactgtgccctgctacggcagatgccccctgagatgccagcgaccaaaggctggccctccctgggtcctctgcgcctgccctctcattcaactgctgacatggctgtcacccacccacagcctcctgctggcttctcaggcccctggccaggcagcttcgtggggtgatggggaacttacaagttctcctgtcaaacccaccaagttgctctgcaaaatccttcctgcaccctgcaggccaaccagcatgggagggggtgtggccggtccaccctcagtgccctttcctgttgtgcaggggcccacgatgtcatcagcaagggtctgatccgctcactgatgtggaagctgtagagggaggagcgttccgggagctcgtcctggacccgctgtctcctgcctgcaggaggatgcaggagagggtctggcacctccaccccatgaggaaggcgagaacaggagaagcactggtgacgatcctgacacccagtggtcactgagtgtgtcctgtgtgccaggcattgtctccaaacctcacatttagacaaccctccagggaggcgatgtctgccttcacaggtgaggaaacggaggcacagtgtcttgtgtctcagtccaggtcacataggatcacagtctacatcctggcctcaaaactgggggagcacaaagactcagagcttgcagtggttggggagtgttcccacactgggaccctcattgtgaggatgggccagtcaccgacccccagagtccctgccttggccgtggccatgtcctcttgctggcgggggcgggggggggcctcttgccttccctaagtccaggtttctctttcttctgagagtctcattagaggcccgggtatttctccaagtgtggcccctgaaccagaccctgggtggtctgtggaaatgcatgttcccaggccccatccccgccccatcattcttaggtttgcacagaggtccctttccatgggatcaggagagtggctttccaggagagaactttctctctgaaaatgcagcctccccagcctccctgcatcctcctatgtccactgtgaccaccatccttgccatcactttctgtgtcatccccaaggggagctcctgaggacaaggctttgctctgtttgctgctccagacccaaaggtcacagcaggggagctttggccccaagttgagaattacctggcccaaaagactgctgaggtggggaaacccagctcttgcctcagcatctcgctgcatgaatgaatcagggaatccctgcagcagtgggacagggtggcacctccctttgagactctgcaggcaccagggtcaaaagagggctagggtgagagggggtgagaagaggcccccccaggctgttagaaattccgtgttggtggcctgccgagaagtaggtggccctggacgcacaagccatcagcctgctcctgaagctgctacactcatgcatgggcagggtgtgcctgaaggccaccaaggccctcaccatgctgccagaggcccctgagggctgcaaggtcctgcaggcccatatgcacaccttccgtgtcctggaggaggactctgacagcaaggcttatgagggcgaggccttatagaaggtgacccagatcgccatcgatgtcattgagtggaaaccctgagcccctcattgggtcagacctgatcagccacctctgcacctgaataaatgcactcagtctctttatttcaagtgggaatggcactttctgctcgtggagcacagtcacgtctcttctcactctcttgccaaaggagaaatgccaggcccagaagcactgggtcctggatggtacaggccaaacctagtgctggcggtgggtgggaagcagccttggactttttctctctgctgggaccaagagttttcctcagaatgtagagaggattgagacctccaggggcaaagctggggaccctgcagcacgcgctggcctgccctttgggtcagcaccctggtcagctccacagaagggcttcaccctggatgaagagataatccctttttagtgagagcaggctcccagctttgtgcactatgacatcatcccactaagcagcctccacgccagcatccctgggctcccgcctctgcagtccaggctgaggagaaattacagatgcggaaactcatcagccagggacagaggtgcctctgttacaaggggagggccaggaacacagcctatgttgggacctagaagtcctgagccccacacccttgcctccattctccaaggcccatttaccgttatcagcttctgggatttaagaaactgctgtcgggagaggtatgggagccagcctggaagaggcaactggtcattcaactgtagcccagaggcacaaactgacaccccagacagctgagtttggacaagggcagagggacagccagtggctataagcccacactatggagggaggctgctgtgttgagacccccagctctacactgactgtttatctgtggagtctggggcaagttgattaactgctcagtgcctcagtttcactagctctaaagtggggcgagtaattgtgcctatcataaatgggtatgattttggcagtgccgggggcatcatactgaaaataagtgccttgtacattgtgggtacccaggaagccagtttacagcccctcagaggagacccatcagcaggcatctgagggagcctggagccctgcatcctgcaggtgcctggggtcttgtgcccaggagaagctgctccctcactccacagcagtctacagagcaccccctgaccaggggtacacctgtttgtgcaggtgtcagcagggagccctgggcctctctgggctctgactttccctggcaggactgtagagggcccagaaccctgccttctcccagccaggcccttccctcccttccccaaactcacggcctcctcaccgctctctgcctcagattcaggactaatctcactatgtccttcatccctgtttgcatcaggggctgcaagaagctcagctcacctctccctcaaggccatgaatactccttttctgaccccatctgctgcaaccttttctccaagccctctggaggccctccctggaacattctttcctttcttgcttggactgaaacctagctctcccaagacctgcttcccctccctgggcatcctcctatgtggggctgctttcctccctccctgcccctcatgccttcactggagtgggacaggtccttacgaaccatctcctatgcccgttctgaggagccctctggttctgaatccctgcacaagctctgttgccctggccgtctctcctccccagcaccacaccaccagattgctcttgtagggcacgacgtggtctccatgtggctgagcccaaccgccagtcctcaggcctcatgtttctttggtcatgaggatttcctcacctcaccacctccccgtccctgaaacacttccaggaaatgaggccacttctctgcaattttggttgttcagtaatgtgctattgtgctctttaagaaactgatacacatcttggtgtgtttaagcctttagggaagtgggaggatactgggggctgctgtgtgagcacctctatgccataccaagtaagaccagtgagggaaactggaccgctaagctgcagggctacctccccctccaggatgcttttcacatcttccaagatcccctcactggagatcttccatggcctggactcatcttaggcctccctgttctgtccatgtgctactggggtgcctgccgatcagataattggtgatgctgtcactgaactgactgcccgcggggactcgtggtctttggcattccaggctccaccacagtctctgcatccacaggcaactgtggtcctggctgctctctgctgttaggtttcccttccatttttacttattgcctaaagaacttcatacaaaactctacttaaaagcagtttattccacagtcccacatagaacacatcaactattttaatttttttcttctttcctatcactgtctaaaagcactcttttttttttttacatagtaagacccagtgtggttgactgtatctaatttttaacctattattagatgggcaaaatttttttttttttttttgagacagagtctgctctgggtgattctctttgattctctctgttctcattccatcacatgctctatggacgcataacccttcaattgcactcatataacctgtcagtaacttttcactccctgagccaagagcttctccttccaagcttcagcaagaccaatttctgacccatggagcaatgggtaacaccagcctcaccgaactcacatgcccagttgtggaagcaaatttcattttatggtaattctattttgccagtacaggcggtgtagcacgttagtttataggttaacctttggcgttaaagagatccagctcttggcgtgtctcctgagtaatttacttaactgagacccacattccccatctgtataatgactaaaacaaaactaattctgtctcaaagtgattgtgacacttcaaggagacaacatacagaagtgcccacatacccaatttatggctgttcttattttcattcattttttttttttttttgagatggaatctcgttctatcacccaggttggagtgcagtgggcatgatctcggctcactgcaaactccgcctcccaggttcacgccattctcctgcctcagcctcccaagtagctgggactacaagcgcccaccaccacacccagctaatgttttgtatttttagtagagacggggtttcactgtgtgagccaggatggtctcgatttcctgacctcgtaatccgcccaccttgcacctgcttattaactacagccatatgtagcagaatgacattttggtcaatgacagaacacatgtatgacagtggtcccataagattataacaaagctgaaaatttccttttccccagtaaagtcgtacctgttagaaggtcggcgcagtgcattacttacgtgtctgtggtgaggcgggtgtaaacaaacctactgcgctgcgtcattacagtaaaacaacacttctttttggagaacattttaagtaatatgttatacaaatgacagactaaccacagtgatggaatttttagaaagagataaaactaagagtccgtgaggatttggagaaacggctactcacatatgctgttagaggagcatgaattggtgtcatcattttggaaaaagtttggcattatttataacaatgaaagatatgcccccttctaacagtctactccacaaaagtgagtgctggtgttattccaaaaccactgacaaaaatactcaaagcaccattacttgagatagccacaattacattaaaaataaccctggccaggcatggtgatacatgcctataatccaagcactttgggaggctgaggcgggcagatcgcctgagctgaggagttcctgactagcctggccaacatggtgaaaccctgtctccaccaaaaatacaaaaaattagccaggcatggtggtggacacctgtagtccccactactcgggaggctgaggcacgagaatggcgtgaacccgggaggcggagcttgcagtgagccgagatcgcaccactgcactccagcctgggtgacagagcgagactccatctcaaaaaaaaaaaaaaagaaaaaaaaaagtctagaacttaagtgatgaatagcaacttagagaacaaaaccaaagccaaatttttgaagacaggaaatagtgtgatactatcttttgtgggaaggaacttttggcttcccaaaaaattagagaactgggagaaagaagccacatctcagaatctgtgattgggttgggcagtggaggctggaaaagtgctcaaggtcaaacttttctcctcccctcaaaggagactggagttttaccagtgaccccagagtgaatattcactccaccatccactccgggagatccctttaaaccaggagtgcacagtgaggacagaaacatgaatgtgcactaacaagtcctgaaagttcagagggtgattctcgatttccccttggcacacagcacaaggactgtttctctaggttccaggaaatgcctgtgagagagttgtgtcccccagattcccttcatcacagatgacacccagtgcttaggcctataccccttgtgcccactcccaaggagtgttgactaatccaaaccaaaggctatgatgttccacagggcacaaaagagcaggtgcactgcaaagataatctctcatgaacgcagcaccctcatagcccatagagacagttcttaccatgatgccaagaaactctgaaaacaacaagccagacctcacacatatttccattttctttctgatttcataccccctccttcagcccctcctcacaagcaacagggataacctggaggctcctgggaaccttttcccattgggtttttgctggcacgtagttccctacctggatgaatctcttcatcacttagactctccagcgtcaagtctttagaaacaaaaacaccagaataagtcattagagagagtgactcacccactcctcctactttactttagctgaagctgagtgatgagctagtctcccactccatgctgcttcatacatgatcccctaatctttcttctgggtcgacaaaccttcctacagcttctcaggccagagttctatactggcagaatcactttcacgagaaccccaagcctctttcccagcaggaccccagaatcaggtttctatacactgaagctagcaagttttttccctcaggaagtgagttatctcatggtacataccactttctatccgagctgttatctgcaattatataaaagaaaacattatgaaaatcagattctgctgtgcgcttcacacagatctgttattctctggacaacgataaaaaaccagaaggcagtatagtgattgagccataggtcaaagtcccccaaagactagcacagaggatagctatagaaaaacaagacctctatttgtagaatttacctttaattttatatgcaaatgcacaatgcttaattcaaggtggaaaactgttgttgtggaaaatgcctcagtattccagttgataatggatgctgtcatttaaaagcaccctagtggaccacatataagttgggaagacactcctatggaattccagccccacaaagagaatagtgtacagtgtacataatgtgcattgccagattttcatatcaaaattaattgagaaataaaggaatcaggaaagcaacattgctgtagaagacaaaaaaagggaggtcttacgtggatgtcatcatcatcttcttcttcttcatctttgtgtctcagtgagcatcttaaaaacaggctatcttcagaacaagctggaaggacacagaggaaagatcagtgcaccggtggttggtgactctgagtcactcggggagctttgctggatgtggtgtatggaggtggttgattaacaagcatggactgagttgatgctgggctattcccctgagtggaagagggatggcaaagaagggaagcatgaaagacatgagacatggaggccttggccttgtactagaggcatcaggaagcaacacaaaacaatcacccccaaatgtaagtaaaatgcacactaagggtcagtggaagagtgccttcctccctctcaaatgttttgaaactcttcaaaaccaacaggattttcttaacgtattcaagactgtgtcagtacactaggatctaattatgctgatactacatttagcatctcttttaaaggatttattacttatttaaaatcatattttattttgaaatggactcaattttacccaaattattctattaatgacactttctttttcatagagatcattttaaaaattcaatattaaaatgctacaattaaaaatagtcatgatttcctctttgtaagtcttcttctggaacaacttctacacacacttttggacagcagctcctgtgtcactctccctgaggagattccctaaaaatcaggcttcattcaaacaggccaagcccacagagcctgctctaactataccagtgaagctgagagacgtgactctgaacactttctgccatgaggataagtttccaggttcaaatatacattatctactgaactggggaaatgtataccaatacaaatgaacaaattcatgaaaaaaagtccatgagtatgggggtgatttttggttagctatcttatataaaaattatttttttggttgagcactctggctcagacctgtaatcccagcagtttgggaggctgaggtgggtggatgacctgaggtcagcagttcatgaccagcctggccaacatggtaaaaccccgtctctactaaaaatacaaaaaaattagccaggcatggcggtgagtgcctgtaattccagctactcaggaggctgaggcaggagaatcacttgaatcttggaggcagaggttgcagtgagccgcgatcacgccattgcactccagcctgggcaagaacagtgaaactccatctcaaaatatacatatatatttatttgatacctattcattcagacatataaaatattggtataagaaaccaaaaatttttatcagtcatgttaaatctaattatcagctgtcaacatgaagatcctcggaagtaaagaaggtacaaataagtggaaaggcatcctgtattcatggataggaagactaaacctgactaacacacaatactacacagatgatctacagactcacaagaactgctatcaaactggcaacagccatctgtgcagaaatggaaaacataatcctacaactttaatgaattttatatgtctcaagtaaccatgatgatgttaaaacaatagtgttagaggttgcacattcatgagattgaaatccacacacacacacaaatacagaaattcagacagcatggttctagcatgggggcactcataagtttcacagatatagagagccaagaattgaatgcacacatacactgtaaactgatcttcaacaaaagtgtcaaaaatacacaatggggaaaggacagcctcttccacaaatgatggtaaaactgcatattctcattcaaataaagaaatagaatgttgacagtgtgctcaaggttgtgcttctccctccatttccaagacactgaagcttgtgcagtgagcccagagtgtattttcattctgtcctccatgcccaggaagagctcttgataccagaggtaagcaagaaaaacagacaaatgaatgtgctgccatgaaacctaacagttcataaggtgagaattaatctctcctatgcatctgggcacaccacagaagaattttgtctccagaattaagtaactgcctgtgacagaactctgtcctaaaccaaaggctttgagattttgcagtggcacaggcagaaaagagcaggtgttctagaaagatcatctgtaaataataaagtaagaagaggtgatcgaaaacacaggatactcaaaagcccataaacatagtacttctcaccatgatgacattaaactctaaaaagaacaaacttgacctatatttactttttctttatctatttctgcaccttccctaaccctgccaagcagcaggtataacatgaaggctcctggaaatgctgtattgattagaccccacttgaaatctttttacctacctggaaaggcatactcttccctgctgagattctccagaatccaatctttagaaccaccaacatcaggataagtcagtgagaggtgcactcacttctactccaggtgaagacacactggctcacacaaaatctcctggttggtcctctgggttcacacacatttctacagcccctcttctcatagctatacacttgcagaatcatttgctctcaccacacccccaatattttttaacaggaacccagattaaggtttccatatattaaagccagcaagtttgtttctcagaaagtgagttagttcaaggtacataccctggacaggtgacggtaaaatctgcaatgagataaaagaagatgctgtaaggatcagatcaattctgccacaccccttacacagatctgttagtctcttgatgacttcacaaaactatttgtaagacagtggtaagtcaaggtcaaagaccaaacattctagcatagaggacatgtgtggaaaagacaagagcttttcccacagaatttatctttgaagttgatttagattggtaaatgcacaatgtctaatccaaggagaaaaactggtgtggaggaaatgcctctgcattacagttgatgatggatgctgtcatttaaaaacatcctagtgtgtcatgcattagatgaaaagaaactcccactgaactccatcctcacaaagagaattgtgtatgttgtacataatgtgacttgtcatatttttatatcaaaattaattgagaagggaagaaatcaggtgaaggaaataatgtatacagtggtccatgtttaatacaaagtgccttgaaccggtctaggtcagcaaaaaaaccagaataggatatgctaggctcctgcttggattggcaatgcctgcttgttgggccccctctcctgggaaatctcacttttactgtttttcagctgcctgagtccattctttgggattggattggtgagtttgtttctcacatcagaaaaccaacatttccttagaagacaaagaaaggttgtcttacctgggcatcatcatcatcatcatcacagtcatcatcttcacttcgtggtaggcatactaaactcaggttgtcctcagaagaacctggaagcacacagaggaaagatccgtgccctggttgtttgtgactgtgagtcactcagggagctttgctggatgtggtatatggaggtggttgattaacaaacatggactggttaatgctggaagagggatggcagaggaggggagcaggcatgaggcatggaggccttggccttgtactagaggcatcacgcagcaacacaaaacagtcaaccccaaatggaactaaagcacacactaagggtcaatggaagagtgccttcctccctctcaaatgttttgaaactcttctaaacaaacagtattttcttaatgtattcaagactgtgtaagtacactggacataattatgctggtacaacatctagcatctgttttaaaggattaattacttaatttattggtgaaatggattcaattttacccaaattactctattctattgatcacacattcttttttttttttttttttgagacagagtctcactctgtcccccaggttggagtgcagtggtgtgatctcagctcactgcaagctccacctcccaggtttgcaccattctcctacctcagcttcccgagtagctgggactacaggcacccaccaccacgtctggctaatttttttgtatttttagtggagttggagtttcaccgtgttagccaggatggtctccatctcctgatctcatgatccacccacctcggcctcccaaagtgctgggattacaggggtgagccaccgcacccagctgatcacaattttttttttcatagagatcatttaaaaaattaaatattaaaatactaaaattaaaaatagtcatgatttcctctttgtaagtcttcttctggaaccatggtgtgtgaacacaaacttttgggtccctgtgatcaagggcttcagcagctctgtgtcaatctccctgaggagattccctaaagatcaggcttcattgaaacaggccaagctcacagagcctgctctacctgtaccagtgaagctgagagaggtgactctgaacactttctgccatgaggataagtttccaggttcaaatatacatgatctactgaaatgaggaaatgtatatcaatagaaatgaacaaattcatgaaaaaatgtccatgagtacgggggtgatttttggttaactagcttatgtaatttttttaccttgatgcctattcattcagacatacaaaatattggtataagatatcacaaatttgtccaggcgcggtggctcatgcctgtaatcccagcactttgggaggccgaggtggggggatcacgaggtcaagagatcgagaccatcctggccaacatggtaaaaccacgtctctactaaatcttcaaaaattagctggacgtggtggcatgcatctgtagtcccagctactagggaggataaggcaggagaatcagttcaacctggaaggcagaggtggcagtgaggagagatcacatcactgcaccccagtatggtgacaagagtgagactccgtctcaaaaaaaaaaaaaaaaaagaaaaagaaatcacaaatttatattagtcatgttaaatctaactaatcagctgtcaacataaagtttctaaaagtaaaaaacatacaaataagttgaaaggcttcccatattcatggataggaagactcagcatgactaacacacaatactacacacatgatctacagactcacaagaactgctatcaaaccggtaacagccacctgcggagaaatggaaaagttaatctaagactttaaggaatctctatgtgcctcaaataaccatggtaatgttgaaaaagaacagtgttggaggatgcacattcatgagattgaaatctacaaaaaacagagaaatgcaaacagcatgcttccagcatggaggtatcacagatatagaatacagagcccagaattaaatgcacacatacagagtcagctgatcttcaacaaagttgtcaagaatacacaatggggaaaggaaagcctcttccacaaatgatggtaaaactgcatattctcattcacatgaaaaaacagaatgctgatagatgctgaaggttgtgcttctccctccatttccaagacactggagctattgcagtgagcccagagtgaattttcattctgtcctccacactcagggagatgtcttgataccagaggtaaacagcaagcacagacaaatgaatgtgctgccatgaaacctaacagttcataaggtgaggatccatttctcctatgcatctgggcacaccacagaattctgtctccaggagtgagtaactgcttgtgacagaactgtgtcccacaccaaagactctgagattttgcagtgccagaggcagaaaagagcaggtgttctcagaaaaataaactttaaataataaagcaagaagaggtgaacaaaaacataggatactcaaaagcccataaacatagtacttctcatcatgatgacattaaactctgaaaagaactcggcttatatttactttttctttttctctttttacaccctccctcacctcccaagcagcagatataacatgaaggttcctggaaatgctgttttattagatcccacctcaagtcttgttgcccacctggaaaggtaacctcttccctgctgagattctccagaatccactctttataaccaccaacatcaggataggtcagtgagcggtgcactcacttctccaactccaggtgaagacacactggctcacacaaaatctcctgcttggtcctctggttcacacacatttctacagcccctctgctcatagttatacacttgcagaatcatttgctctcaccacacccccaatatttttaacaggaacccagattaaggttcctatatattaaagccagcaagtttgtttctcagaaagtgagttagttcaaggtacataccctggacacgtgacggtaaaatctgcaacgagacaaaagaagatgctatgaggatcagatcaattctgctgcaccccttacacagatctgttattctcttgatgacttcagaaaactagttgtgaaactgttgttgagtcaaggtcaaaggccaaacattctagcatagagaacacctgtggaaaagacaagagttttcccacagaatttatctttaaggtattggtattggtatctttaaggctattgacttagattggtaaatgcacaatgcctaatccaaagagaaaaactggtgtggaggaaaatgcctctgcattacagtagatgatggacaccatcatttaaaaacatcctagtgtgtcatgtattcgatgaaaagaaactcccgctgaactccatcctcacagagagaactgtgtatgttgtatataatgcgccttgtcatatttttataccaagattaattgagaaggaaagaaatcaggtgaaggaaataatgtatacagtggtccatttttaacacaatctgccttgaactggtttaggtgagcaaaacacagaagaaataggatatgctgggctcctgcttggatgggcaatgcctgcttgttgggccccctctcctccccacttaattgccctcacttcaaccaaagaagtttagtctaagttgaaagtttactagcctgcaaaatagctcgctttgtctgttcttatcagcctgcccagctacttaggtcataggtcaaatacttgaagagcccctgagctcactaggatggtaatgcattgtgggctgcaacaaaatgcagtaagacaaccataaaaaaaaaaatacctaaagcccctccccaacaatcaatatgtgacacccacgaagattgtgacctcatagtactcagcctatgaggaaccagggtagggacctgcacactaggggataaattgcttgttgaaactgtgctgggtgtgtctgcccataaggtaccggatcttgcaagatcttgcaagactgtcattaaaagtctcactttcggccaggtggggtggctcatgcctgtaataccagcactttcggaagccgaggtgggtggattacctgcggtcaggagttcgagaccagcctggccaaaatggtaaaacaccgtctctactaagaatacaaaaattatctgggcatgaagacacatgcctgtaatcccagctacctgggaggctgaggcaggagaattcattgagcccaggagatggagccgagattgcaccactgcactccagcctggtgaactgagtgagactctgtctcaaacaaaaacaaaaacaaaacaaaacaaaaaaagaaaagaaaagaaaaaagaaacaaagaaaggaaagaaaatctcacttttgttgtttatagctccctgagtccattctttgggattggactggtgagtttgtttctcacatcagaaaaccaacatttccttagaagacaaagaaagattgtcttacctgggcatcatcatcatcatcatcatcacagtcatcatcttcacttcgtggtaggcatactaaactcaggttgtcctcagaagaacctggaaggacacagaggaaagatccgtgccctggttgattgtgactgtgagtcactcagggagctttgctggatgtggtgtatggaggtggttgattaacaagcatggactgagttaatgctgggctattcccctgagtggaagagggatggcagaggaggggagcaggaaagacatgagacatggaggccttggccttgtactagaggcatcatgcagcaacacaaaacagtcaaccccaaatggaactaaagcatacactaagggtcaatggaagagtgccttcctacctctcaaatgttttgaaactcttcaaaaccaacagtattttcttaatgtattcaagatcgtgtcagtacactaggatccaattatgctggtactacatttagcatctgttttaaaagatctattacttaattaaaagtctattttattggtgaaatggactcaattttacccaaattactctattaatcacacattctttttcatagagaccatttaaaaaagaatatgaaaatgctacaattaaaaatagtcatgatttcctctttgtaagtcttcttctggaataatggtgtgtgcccacaaccttttgggcccctgtaatcaagggcttcatcagctctgtgtcactctccctcaggagattccgtaaagatcaggtttcattcaaacaggccaagctcacacagcctgctctaactacaccagtgaatctgagagacgtgactctgaacactttctgccatgaggataagtttccaggttcaaatatacatgatctatggaaatgaggaaatgtataccaatacaaatgaacaaattcattaaaaaatgtccatgaggaaaagcgtgattttttggttaactagcttacataaattttttttgtttgatgcctattgtaccaaaaaatattggtacaagatatcacaaatttggctgggcatggtggctcatgcctataatcccagcactttttgggaggctgaggcgggcagatcacgacatcaaaagattgagaccatcccggccaacatggtaaaaccacatctctactaaaaatacaaaaattatctaggcatggtggcacatgactgtagtcccagctactcaggaggataaggcagaaaaatcacttgcacccaggaggcagaggtagaagtgagcagagatcacatcactgcaccccagtatggtgacagagtgagactccatctcaaaaaacaaaaaagaaaagaaaaaaatagaaatcacaaatttatatcagtcttgttaaatctaactaatcagctgtcaacataaagattctagaaagtaaagaacatacaaataagtagaaaggcatcccatattcatggataggaagactgagcctgactaacacacaatactacacaaataatctacagattaacaactgctatcaaactggtaacagccatgtgtgcagaaatggaaaagataatcctcagactttaatgaattttcatttgcctcaaataaacttggtaatgttggaaaagaatagtgttggtggatgcacattcatgagattgaaatctacaaaaaacagaaattcagacagcatgcttctagcttgggggcacccataagtatcacagatgtagaatagagagcccagaattaaatgcacacatacagagtcagctgatcttcaatgaaggtaccaagaatacacaatgaggaaaggaaagtctcttccacaaatgatggtaaaactgcatattctcaacagaatgctgacagtgtgctcaaggttgtgcttctctctcaacagaatgctgacagtgtgctcaaggttgtgcttctccctccatttccaagacactggaccttttgcagtgagcccagagtgaattttcattctgtcctccacactcagggagatgtcttgataccagaggtaaacagcaagcacagacaaatgaatgtgctgccatgaaacctaacagttcataaggtgaggatccatttctcctatgcatctggcacaccgcagaagaattctgtctccaggagtgagtaactgcttgtgacagaactgtgtcccaaaccacaggctctgagattttgcagtggcacaggcagaaaagagcaggtgttctcagaaaaatcatctttaaataataaagcaagaagaaatgatcaaaaacacaggatactcaatagcccataaacataatacttctcacctgatgacattaaactctgaaaataacaaactcagcttctatttactttttctttttctgtttctacaccctccctcagcctcccaagcagcaggtataacatgaaggttcttgtaaatgctgttttattagaccccatctgaagtattgttacctacctgaaaaagcatagtcttccccactaaagttctccagaatccactctttaggattctggtatctttaccaacatcaggataagtcagtgagaggtgcactcacttctactccaggtgaagacacactggctcacacaaaatctcctcattggtcctctgggttcacacacatttctacatcctctctgctcataattatacactcgcagaatcatttgctctcaccagacccccaatattttttaacaggaatccagattaaggtttctatatattaaagctagcaagtttgtttctcagaaagtgagttagttcaaggtacgtaccctggacaggtgatggtaaaatctgcaatgagacaaaagaagatgctatgaggatcagatcaattctgctgcaccccctacacagatcagttattctcttgatgacttcagaaaactacttttgaaacagtggttgagtccatgtcaaagacaaaacactttagcatagaggacatgagtgaaaagacaagagcttttcccacagaatttctttgaggttgatttaggttggtaaatgcacaatgcctaatttaaagaggaaaactggtgtggaggaaaatgcctctgcattacagttgatgatggatgctgtcatttaaaaacatcctagtgtgtcatgtattagatgaaaagaaactcccactgaattc

SEQ ID NO: 24 - DNA, 120096 bp, Homo sapiens
aagcttgtgcagtgagcccagagtgtattttcattctgtcctccatgcccaggaagagctcttgataccagaggtaagcaagaaaaacagacaaatgaatgtgctgccatgaaacctaacagttcataaggtgagaattaatctctcctatgcatctgggcacaccacagaagaattttgtctccagaattaagtaactgcctgtgacagaactctgtcctaaaccaaaggctttgagattttgcagtggcacaggcagaaaagagcaggtgttctagaaagatcatctgtaaataataaagtaagaagaggtgatcgaaaacacaggatactcaaaagcccataaacatagtacttctcaccatgatgacattaaactctaaaaagaacaaacttgacctatatttactttttctttatctatttctgcaccttccctaaccctgccaagcagcaggtataacatgaaggctcctggaaatgctgtattgattagaccccacttgaaatctttttacctacctggaaaggcatactcttccctgctgagattctccagaatccaatctttagaaccaccaacatcaggataagtcagtgagaggtgcactcacttctactccaggtgaagacacactggctcacacaaaatctcctggttggtcctctgggttcacacacatttctacagcccctcttctcatagctatacacttgcagaatcatttgctctcaccacacccccaatattttttaacaggaacccagattaaggtttccatatattaaagccagcaagtttgtttctcagaaagtgagttagttcaaggtacataccctggacaggtgacggtaaaatctgcaatgagataaaagaagatgctgtaaggatcagatcaattctgccacaccccttacacagatctgttagtctcttgatgacttcacaaaactatttgtaagacagtggtaagtcaaggtcaaagaccaaacattctagcatagaggacatgtgtggaaaagacaagagcttttcccacagaatttatctttgaagttgatttagattggtaaatgcacaatgtctaatccaaggagaaaaactggtgtggaggaaatgcctctgcattacagttgatgatggatgctgtcatttaaaaacatcctagtgtgtcatgcattagatgaaaagaaactcccactgaactccatcctcacaaagagaattgtgtatgttgtacataatgtgacttgtcatatttttatatcaaaattaattgagaagggaagaaatcaggtgaaggaaataatgtatacagtggtccatgtttaatacaaagtgccttgaaccggtctaggtcagcaaaaaaaccagaataggatatgctaggctcctgcttggattggcaatgcctgcttgttgggccccctctcctgggaaatctcacttttactgtttttcagctgcctgagtccattctttgggattggattggtgagtttgtttctcacatcagaaaaccaacatttccttagaagacaaagaaaggttgtcttacctgggcatcatcatcatcatcatcacagtcatcatcttcacttcgtggtaggcatactaaactcaggttgtcctcagaagaacctggaagcacacagaggaaagatccgtgccctggttgtttgtgactgtgagtcactcagggagctttgctggatgtggtatatggaggtggttgattaacaaacatggactggttaatgctggaagagggatggcagaggaggggagcaggcatgaggcatggaggccttggccttgtactagaggcatcacgcagcaacacaaaacagtcaaccccaaatggaactaaagcacacactaagggtcaatggaagagtgccttcctccctctcaaatgttttgaaactcttctaaacaaacagtattttcttaatgtattcaagactgtgtaagtacactggacataattatgctggtacaacatctagcatctgttttaaaggattaattacttaatttattggtgaaatggattcaattttacccaaattactctattctattgatcacacattcttttttttttttttttttgagacagagtctcactctgtcccccaggttggagtgcagtggtgtgatctcagctcactgcaagctccacctcccaggtttgcaccattctcctacctcagcttcccgagtagctgggactacaggcacccaccaccacgtctggctaatttttttgtatttttagtggagttggagtttcaccgtgttagccaggatggtctccatctcctgatctcatgatccacccacctcggcctcccaaagtgctgggattacaggggtgagccaccgcacccagctgatcacaattttttttttcatagagatcatttaaaaaattaaatattaaaatactaaaattaaaaatagtcatgatttcctctttgtaagtcttcttctggaaccatggtgtgtgaacacaaacttttgggtccctgtgatcaagggcttcagcagctctgtgtcaatctccctgaggagattccctaaagatcaggcttcattgaaacaggccaagctcacagagcctgctctacctgtaccagtgaagctgagagaggtgactctgaacactttctgccatgaggataagtttccaggttcaaatatacatgatctactgaaatgaggaaatgtatatcaatagaaatgaacaaattcatgaaaaaatgtccatgagtacgggggtgatttttggttaactagcttatgtaatttttttaccttgatgcctattcattcagacatacaaaatattggtataagatatcacaaatttgtccaggcgcggtggctcatgcctgtaatcccagcactttgggaggccgaggtggggggatcacgaggtcaagagatcgagaccatcctggccaacatggtaaaaccacgtctctactaaatcttcaaaaattagctggacgtggtggcatgcatctgtagtcccagctactagggaggataaggcaggagaatcagttcaacctggaaggcagaggtggcagtgaggagagatcacatcactgcaccccagtatggtgacaagagtgagactccgtctcaaaaaaaaaaaaaaaaaagaaaaagaaatcacaaatttatattagtcatgttaaatctaactaatcagctgtcaacataaagtttctaaaagtaaaaaacatacaaataagttgaaaggcttcccatattcatggataggaagactcagcatgactaacacacaatactacacacatgatctacagactcacaagaactgctatcaaaccggtaacagccacctgcggagaaatggaaaagttaatctaagactttaaggaatctctatgtgcctcaaataaccatggtaatgttgaaaaagaacagtgttggaggatgcacattcatgagattgaaatctacaaaaaacagagaaatgcaaacagcatgcttccagcatggaggtatcacagatatagaatacagagcccagaattaaatgcacacatacagagtcagctgatcttcaacaaagttgtcaagaatacacaatggggaaaggaaagcctcttccacaaatgatggtaaaactgcatattctcattcacatgaaaaaacagaatgctgatagatgctgaaggttgtgcttctccctccatttccaagacactggagctattgcagtgagcccagagtgaattttcattctgtcctccacactcagggagatgtcttgataccagaggtaaacagcaagcacagacaaatgaatgtgctgccatgaaacctaacagttcataaggtgaggatccatttctcctatgcatctgggcacaccacagaattctgtctccaggagtgagtaactgcttgtgacagaactgtgtcccacaccaaagactctgagattttgcagtgccagaggcagaaaagagcaggtgttctcagaaaaataaactttaaataataaagcaagaagaggtgaacaaaaacataggatactcaaaagcccataaacatagtacttctcatcatgatgacattaaactctgaaaagaactcggcttatatttactttttctttttctctttttacaccctccctcacctcccaagcagcagatataacatgaaggttcctggaaatgctgttttattagatcccacctcaagtcttgttgcccacctggaaaggtaacctcttccctgctgagattctccagaatccactctttataaccaccaacatcaggataggtcagtgagcggtgcactcacttctccaactccaggtgaagacacactggctcacacaaaatctcctgcttggtcctctggttcacacacatttctacagcccctctgctcatagttatacacttgcagaatcatttgctctcaccacacccccaatatttttaacaggaacccagattaaggttcctatatattaaagccagcaagtttgtttctcagaaagtgagttagttcaaggtacataccctggacacgtgacggtaaaatctgcaacgagacaaaagaagatgctatgaggatcagatcaattctgctgcaccccttacacagatctgttattctcttgatgacttcagaaaactagttgtgaaactgttgttgagtcaaggtcaaaggccaaacattctagcatagagaacacctgtggaaaagacaagagttttcccacagaatttatctttaaggtattggtattggtatctttaaggctattgacttagattggtaaatgcacaatgcctaatccaaagagaaaaactggtgtggaggaaaatgcctctgcattacagtagatgatggacaccatcatttaaaaacatcctagtgtgtcatgtattcgatgaaaagaaactcccgctgaactccatcctcacagagagaactgtgtatgttgtatataatgcgccttgtcatatttttataccaagattaattgagaaggaaagaaatcaggtgaaggaaataatgtatacagtggtccatttttaacacaatctgccttgaactggtttaggtgagcaaaacacagaagaaataggatatgctgggctcctgcttggatgggcaatgcctgcttgttgggccccctctcctccccacttaattgccctcacttcaaccaaagaagtttagtctaagttgaaagtttactagcctgcaaaatagctcgctttgtctgttcttatcagcctgcccagctacttaggtcataggtcaaatacttgaagagcccctgagctcactaggatggtaatgcattgtgggctgcaacaaaatgcagtaagacaaccataaaaaaaaaaatacctaaagcccctccccaacaatcaatatgtgacacccacgaagattgtgacctcatagtactcagcctatgaggaaccagggtagggacctgcacactaggggataaattgcttgttgaaactgtgctgggtgtgtctgcccataaggtaccggatcttgcaagatcttgcaagactgtcattaaaagtctcactttcggccaggtggggtggctcatgcctgtaataccagcactttcggaagccgaggtgggtggattacctgcggtcaggagttcgagaccagcctggccaaaatggtaaaacaccgtctctactaagaatacaaaaattatctgggcatgaagacacatgcctgtaatcccagctacctgggaggctgaggcaggagaattcattgagcccaggagatggagccgagattgcaccactgcactccagcctggtgaactgagtgagactctgtctcaaacaaaaacaaaaacaaaacaaaacaaaaaaagaaaagaaaagaaaaaagaaacaaagaaaggaaagaaaatctcacttttgttgtttatagctccctgagtccattctttgggattggactggtgagtttgtttctcacatcagaaaaccaacatttccttagaagacaaagaaagattgtcttacctgggcatcatcatcatcatcatcatcacagtcatcatcttcacttcgtggtaggcatactaaactcaggttgtcctcagaagaacctggaaggacacagaggaaagatccgtgccctggttgattgtgactgtgagtcactcagggagctttgctggatgtggtgtatggaggtggttgattaacaagcatggactgagttaatgctgggctattcccctgagtggaagagggatggcagaggaggggagcaggaaagacatgagacatggaggccttggccttgtactagaggcatcatgcagcaacacaaaacagtcaaccccaaatggaactaaagcatacactaagggtcaatggaagagtgccttcctacctctcaaatgttttgaaactcttcaaaaccaacagtattttcttaatgtattcaagatcgtgtcagtacactaggatccaattatgctggtactacatttagcatctgttttaaaagatctattacttaattaaaagtctattttattggtgaaatggactcaattttacccaaattactctattaatcacacattctttttcatagagaccatttaaaaaagaatatgaaaatgctacaattaaaaatagtcatgatttcctctttgtaagtcttcttctggaataatggtgtgtgcccacaaccttttgggcccctgtaatcaagggcttcatcagctctgtgtcactctccctcaggagattccgtaaagatcaggtttcattcaaacaggccaagctcacacagcctgctctaactacaccagtgaatctgagagacgtgactctgaacactttctgccatgaggataagtttccaggttcaaatatacatgatctatggaaatgaggaaatgtataccaatacaaatgaacaaattcattaaaaaatgtccatgaggaaaagcgtgattttttggttaactagcttacataaattttttttgtttgatgcctattgtaccaaaaaatattggtacaagatatcacaaatttggctgggcatggtggctcatgcctataatcccagcactttttgggaggctgaggcgggcagatcacgacatcaaaagattgagaccatcccggccaacatggtaaaaccacatctctactaaaaatacaaaaattatctaggcatggtggcacatgactgtagtcccagctactcaggaggataaggcagaaaaatcacttgcacccaggaggcagaggtagaagtgagcagagatcacatcactgcaccccagtatggtgacagagtgagactccatctcaaaaaacaaaaaagaaaagaaaaaaatagaaatcacaaatttatatcagtcttgttaaatctaactaatcagctgtcaacataaagattctagaaagtaaagaacatacaaataagtagaaaggcatcccatattcatggataggaagactgagcctgactaacacacaatactacacaaataatctacagattaacaactgctatcaaactggtaacagccatgtgtgcagaaatggaaaagataatcctcagactttaatgaattttcatttgcctcaaataaacttggtaatgttggaaaagaatagtgttggtggatgcacattcatgagattgaaatctacaaaaaacagaaattcagacagcatgcttctagcttgggggcacccataagtatcacagatgtagaatagagagcccagaattaaatgcacacatacagagtcagctgatcttcaatgaaggtaccaagaatacacaatgaggaaaggaaagtctcttccacaaatgatggtaaaactgcatattctcaacagaatgctgacagtgtgctcaaggttgtgcttctctctcaacagaatgctgacagtgtgctcaaggttgtgcttctccctccatttccaagacactggaccttttgcagtgagcccagagtgaattttcattctgtcctccacactcagggagatgtcttgataccagaggtaaacagcaagcacagacaaatgaatgtgctgccatgaaacctaacagttcataaggtgaggatccatttctcctatgcatctggcacaccgcagaagaattctgtctccaggagtgagtaactgcttgtgacagaactgtgtcccaaaccacaggctctgagattttgcagtggcacaggcagaaaagagcaggtgttctcagaaaaatcatctttaaataataaagcaagaagaaatgatcaaaaacacaggatactcaatagcccataaacataatacttctcacctgatgacattaaactctgaaaataacaaactcagcttctatttactttttctttttctgtttctacaccctccctcagcctcccaagcagcaggtataacatgaaggttcttgtaaatgctgttttattagaccccatctgaagtattgttacctacctgaaaaagcatagtcttccccactaaagttctccagaatccactctttaggattctggtatctttaccaacatcaggataagtcagtgagaggtgcactcacttctactccaggtgaagacacactggctcacacaaaatctcctcattggtcctctgggttcacacacatttctacatcctctctgctcataattatacactcgcagaatcatttgctctcaccagacccccaatattttttaacaggaatccagattaaggtttctatatattaaagctagcaagtttgtttctcagaaagtgagttagttcaaggtacgtaccctggacaggtgatggtaaaatctgcaatgagacaaaagaagatgctatgaggatcagatcaattctgctgcaccccctacacagatcagttattctcttgatgacttcagaaaactacttttgaaacagtggttgagtccatgtcaaagacaaaacactttagcatagaggacatgagtgaaaagacaagagcttttcccacagaatttctttgaggttgatttaggttggtaaatgcacaatgcctaatttaaagaggaaaactggtgtggaggaaaatgcctctgcattacagttgatgatggatgctgtcatttaaaaacatcctagtgtgtcatgtattagatgaaaagaaactcccactgaattccatcctcacaaagacaattgtgtacgttgtacataatgtgtcttgttatatttttatatcaaaattaattgagaaggaaagaaatcaggtgaaggaaataatgtatacagtggtccatttttaacacaaactgtcttgaaccagtgtaggtcagcaaaaaaacagaagaaataggatatgctgggctcctgcttggatgggcaatgcctgcttgttgggctccctttcctccccacttagttgccctcactggaaccaaagaagtttagtctaagttgaaagtttactagcctgcaaaatagctcgctttgtctgttcttatcagcctgcccaactacttaggtcataagtcaaatacttgaagagaccctgagctgactaggatgtcaatgcagtgtgggctgcaacaaaatgcagtaagacaaccataaaaaaaaatacctaaagcccctacccaacaatcgatgtgtgacacccgggaagattgtgacctcatagtactcagcctatgaggaaccagaggagtgacctgcacactcggggataaattgcttgttgaaaccgttctgggtgtgtctgcacccagatcttgcaagaccatcattaaaagtcttacttttgctgttctgcaggcctctgagtccattctttgggtttagatgggtgaatttgtttctgacatcaggaaagcaacatttccttagaaggcaaagaaagggggtcttaccttggcatcatcattgtcttcctcacttgatggcagaaattttaaactcaggcggtcctcagggggacctaaaaggacacagagttaatgtcagtgccctggtggttggagactgggagtccctcagggagctttgctggatgcggcacatggagcgtgggactgaaggttcggagaccatctcagagaaacaactgtgttcaagtagtgagcatgagggagtctcaccagataccttgcatcttagccagtgcccagacctaataagactcttgcattccgaagtcccagaagatattaaccaatcaaaaatcagggctttgatgtttgctgtgacataggaaaaactggtcttctgggaaaggtaatcattaaatatcagagcaagaaaaaaaatggttacaaacacagcacacaaagcccatggatacaaattgtctcatatctatcttattaaaattccaaaggaacaagtcagacttctacacatatttcctttggttctgacttcattgcccttttcctaggttccaaagcaacaggtgtcactcaactgctccccagagatcctcctagagtatcattctctagctgcagatctgcctcattgcagctgccctcatggatggtgtccattggccaatcattaagagacaaaaactctgcaagaagttattccagagagcaactcgcccagcctcctactgcaggtgaggccacactgggttgcacaagattgctctgcactttcctaggtgttgtcagactctccctggtctctgtggagtcagaggtctctaaaaaggcattgctcacacttgccagcctttgagtgagaaagaggaactgaaggaaccacttttaactttttccttccactggcccattacaggtctcacctccaatctcacagccctgagattcccactttgatgtgcacgctttgagttacaggagttcaacaattggtccctcagccaggctcacagcagatgtgaaagagcattctgcggggatgtaaatctctccacttcattaacataaggctgatgggccattgcacggtggctgttgtgatgaggttctgatttttttttttttttttttttgagacggagtttcactcttgctgcccaggctggagtacaatggcatgatctcggctcactgcaacctctgcctcccaggttcaggtgattctcctgcctcagtttcccaagtagctgggattacaggtgtgcgtcaccacacctggctaatttttgcatttttagtagagatggggtttcaccatgttggccaggctggtctcgaactcctgacctcagatgatccactggccctggcctcccaaagtgctggaattacaggtgtgagccaccacgcccggccctgaacttttaattgtaaatagttaaatgtatttaaatatgaggaggcacagatatgactgagaacctcactagatggcacaggagatccagacatgaggaagacatgactcccctcccctggtgttttcttgcaaaatagtttgcagctctgctcctaccatatgtttatggttacttcctgggcatctacacaagggccagtcactgtgtggggctggggatatgacaacaatgagaacaacatccaggtccagagggattccagcagggggtgcacgtgcacacaggggaagagcgtggccctgcacagcctgtctagacaggatcagagcagcaggagccaaggggcaggggcacctcactgtcctcaggagctcaacttcatctccagggaccctgactcagaaactggggcagcctccaggattggtgtagggctcaacaggctggacaggctgagaagggaacatttccacaactaagctagatcccaccccagaggcgacctagaactcatcccaggggtgtgttcattacaatgcccatggggcctaacatgttctccccaggactgagctctgggataaggactaatgaggaagacacagtcactgccctggcaggaaacacccatagccagggcccctctacccaccctgtgggaagacacaacacagatagagtttgacactgaagattccaaaccttctataaaataagtggaaactgatgtgtgctggattccacagaagagttgcaaggatgagctggactctggaatcagtccccatccctctgctgagctcatggtgcactggaacttgtgtccctccccacctcccctgctactcaggagtgctgcagctacaggctcagtgctagggggctctgtccagttgatacacacgtcagccaggcacagtggctcacgcctgtaatcctagaactttgggaggccgaggtgggtggatcacttgatgtcaggagtttgagaccagcctggccaacatggagaaaccctgtctctgctacaaatataaaaattagttgggtgcggtggcacatgcctgtaattccagctactcagcaggctgaggcagcagaatcagttgaacttgggaggtggacgttgcagtgagctgagatcgcacaactgcactactccagcctgggcaacagagtgagactccacctcaaaaaacagacaaacaaaaacacatttctgagccagacaacccttggcaaatagtgtctcctcaaggccattcctcaagtgacttccataagaggtgaaaaagaaaaagtcatctgtcccagccccaggaagatcaggcctgggacctgtctgtgtctgtcctgaccctgaagtccatccctgctgacttgtgtcctgtctgctctgtgtcagagaagtggggacctgattcctgctctgcccccccaccaatttctgccagtgtcaacggccatcatcgcacaaagagatggagaagacaagagaaagcaatgaaactccattcttgaggcatttaggatgatgtccatgccatgctctcggcagacaggaaggccaggtcctgttcactcctactcagaaggggtctcagatatatgagtactaaccctgttagatatttctcctccgctcttctctttaattttttgttttgtttgtttgtttgttttgagaagcagtctcagtcactgaggctggagtgcaatggctcgatctcagctcactgcaacctctgcctcttgggttcaagtgattctcctgcctcaacctcccgagtagctgggattacaggcacccaccaccacatccaactcatttttatattttcagtagagacagggtttcgccaggttggccaggctggtctcaaactcctaacctcaggcaatccacccacctcggcctcccaaagtgctgggattacaggcatgagccaccgcaccctgcccatgtcttccatttatttgcactgtgtgtgcatccattgagtcagtggctgctcatgctcacaccagcccccaacagtgggacagtccatcatggggatcagtacatggggatcagtacatggggatcagtacatgagtgttgagcctcactaacctactggtgcaagaggtctccaatgagggtgatcggcaccaggctaataataatattgtcctgagttctgacgtggcactggcccttgtctgtctgctatggattgcagcatttctttttatttatttctttatgtttttgagacagagtctcactctgtcacccaggctggagggggcagtggctcgatctcggctcactgcaacctccacctcccaggttcaagcgattctccagcctcagccacccaagtacctaggactacaggtatgggccaccatggccagctaatttttgtatttttattagagacaggtttttaccatgttggccaggctggtctcaagctcctgacctcaggtgatctgctgtcttggcatcccaaagtgctgggattacaggtgtgagccaccgtgcccggccatggattggagcatttctaaggcttgaggtactcatgttactaaatacaatgcaatatcttcctgatccttccctgctttgaccaagtgctgaggaatgaccccagcactgacagatgttgacctgcactgttccatgtgatcccttacacttctcagaatctgtgagctgaccagaagcctgtgagctttctatgtgtatttcacagtaatgcccatgccaacgtctattgttccgtgtaccttttgctacccagagttatgtgaccactggggccccatctgatggtgggcaatgtttggcacacttataggccatccactaccactaccaggggcacgcataggtgctggaactccctggtgtggggtcatatatcacggtggagtgatgacacggttgagtaatgcagaccatcaacatcgggacccatttctgggttcacttttgcctcttccattcaggaggtcaaaatctgggttcattcctttccacactctctctctctctaagaagtagggatattaaactgaccttcaggtacactgtgttgagtgaaaaagaggtcatttatgtaaagtgtatggtggtgctgaagtttttcttcctttttattagaagaatgacatgacttgggaggctgaggtgagaggaccaccataggccaggaattcaagaaaactgacacttgcacttgtgctgggcatgcgggtccacatttttgggggaaaacacacatttacaaacactacacattaattcacccctggctatctcccaaccctcatgcacacaaacccacatcatctaaatgacacggctgtttccagggactctagtggatgatgacagttcttcactgagccatctgtttctcacactgcactccaggtcctcactcctatcaggaacctgaagccaggcaggctctccagacagaagcagggaagagagtcccctgcgaaccatcacttagatttgtcatcagcaaaggagtggtcttagaatacgtacggtgttagacagggaatgatacacactggggcctgtcagggggcaggggaagggagagaatatggataaacagttaatgcatgcagggcttcatacctaggtgatgggttgacaggtgcagcaaaccaccatggcacacttttacctacgtaacaaacctgtacatcctgcacatgtacctcggaacttaaaaaaaattaaattaggagccgggcgcgatgcctcatgcctgtaatcacagcactttgggaggccgaggcgggcagatcaccaggtcaggagatcgagaccattctggctaacacagtgaaatcccgtctctactaaaaatacaaaaaattagccgggcgtggtagtgggcacctgtagtccctactcaggaggctgatgctagagaatcgcttgaacccaggaggcagaggttgcagtgagctgagatcccgccactgcactccagcctgggcaacagagcaagactccatctaaaataaataaataaataaataaataaataataaataaaatttacaaaaaataagctaccttaagagatggaagaaaaacaatctgacccttagctggttccttcatttaggtaccaaaccggccagataggtgaggctagagaatgggatggggactccaaaattggggtatttgaattttcattgagaaaagggctctcccttttctagatcaaaaagtctcaacgacaaagacaggaggcagagtcagcctttgtcccccatgcccagacctgggaaagctggctatggacaggagggagctggaagctgaggatgtctctggggatgagggtaagggaagggggtgggggtggccagaggtgtgccagagggtaaacggcacccgtggcttttttacctgtgggcatcttttggttgctgatgtgctgcaggtcttggccctccgtggctcccacatccagcttgccaggctctacagtagtggattctgatgttgcagcagccacagtctcataaatatcagtatcagattcataacagggtgcgtccttccccctgggccagccacagtgggagttgatacaacaggtcagtatattccccatggggcctctccatgcctctccactcctgcctcagccttcagcgaaattgtaactgtgctgccctagcagccacactactgagggtggccctgcacttttagaagcagcctgaccccaggcagatctgggtcctcagcccttattctgccgccacctcccaaactagctggtctatgaggtcagggacctgctgtcttctttgaaaaataaacgaacatgacaagcacccaaaggtgcaaaaactgccatcaaagagcacagttggagctcctcctccctccactgcgagctactgactgagggctgctggccctggctgatgcttataacccacaaagcttcctatgtcacctggttaccaggaaacagccaggtcaggctagtgactcacaatgtccagccccacagccccccccaatgcctcataatgcctgtccctgctgctgcccaccttgtggcccccctgcccctctgtggggactgcactactcaggcttttattcaccctatgctgcctgagctttccagtcctgagctaagtgcagggggagttgttattgcgagtcacccttggcaagaaactcaatagaaaaccctggtatggccgggagtggtggctcacgcctgtaatcctagcactttgggaggctgagcggggggggtggatcacttgaggtcaggagttcaagaccagcctggccaacatggtgaaaacttgtctctactaaaaatacaaaatattagctcggcctggtggcgggcacctgcaatcctagctactcaggaggctgaggcaggagaatcgcttgaatccaggaggcggaggttgcacagtgagccaagatcacaccattgcactccagcctgggtgacaaaggtgcaactgtctttaaaaaaaaaaaaaaaaaagaaacaaaagaaagaaaaccccagttactaaagtcagttccaccagcagttctgtttttctgagtctgacagctttcatttgctcaccaaatgtagttatacacaaattttttactgcttttctaattaaatgcttctctcctgtcttacaagtgttagttcttgtctgcaacttgaccatagctacccccagggccctggtcccactctcaatagagagttatggctgtgtatcctcagtgaaaccctgggacacatcacacttccctcctcgtctataaaatagggactgaacacatccttcccagttctgtaatgctacgacctaccaactcccttttctcgctctgtttcttctttccatggcaggggtattcagatatttcttttatttacttatttatttattttttgagatggactattgctctgtcgaccaggctggagtgcagtggcacgatctcggctcactgtaacctccacctcccaggttcaagcgattctccagcctcagcctcctgagtagcctggactacaggcacacgccaccgcatctggctaatttttgtatttctagtagagacgagggtttcaccatgttggtcaggctggtcttgaactcatctcaggtgatccacccgcctcgtcctcccaaagtgctgggattacaggcatgaaccaccatgcccagcctcaggtatttcttttactaacaaatcataaaacattattttcttatacaaaattgagaaccccacagtggggtaccattgtcctcataggacaaagacaaatagtcaatatctggcaagcattatgtgcctgacagtgttccaactgtggcatactaatttaaccctcagaaatagtcccattttacacatcttacagcgtaaatctagagggaaaagtcaagtaacttccccaaggtcccacaactgctcagtgagttcaggcagatgagcaaacaaaggcttagagttcagttgtctgaggctacactgcaaaacagtggatgaacctggaatacaaaggctcattcactgtccagcagtagagttgaagtagagtttaagttttattctggaaacatgagagtcacggaaccacacagaggtgaggagtctctatcagatgtgtttgcagtgaggtctctctgcacaatagagaaggactcatggaaccagtgggaccaattaagagacatgatgttgggaggccaaggtgagtggatcatttgaggtcaggagttcgagaccagcctggccaacatggtgaaaccccatgtctactaaaaatacaaaaattagcctggcatgatggcgggtacctgtagtcccatctacccaaggggctgaggcaggagaatcgcttgaacccaggaggtggaggttgcagtgagccaagatcacaccactgaactccagcctgggcaacagggagagattctgtctcaaaaaaaaagagagagagacattatgttcatctggaagaacagataaggccaaaggaagtagaaatgactgaagtggacagagaagttctgtgatcatttggcagagagaacagaaagtgctagaggattagatgtggaagaacaggggaaggaaaaggaaaaacaggctgctaaggctctagtttgaaggactgggtaaatagcagtgaatgtctcctacaaagacaatgtaggaagaggaataggtatggggaataagatagttttcggctgggtgcaatgactcacgcctgtaatcccagcactttggaaggccgagctgggtggattatgaggtcaggagttcgagatcagcctggccaacatggtgaaaccccatttctactaaaattacaaaaattagccgggtgcgatgatgggcacctgtaatcccagctactcaggagactgaggcaggagaattgcttaaacctggggggcggagtttgcagtgagccgagattgtgccactgcactctagcctgggtgacagcgtgagactctgtctcaaaaaaaaaaaaaaaacaccacatagttttggactcttaagtatcgcattgaaatggagctctctggtagaaagttggacagaaacctctgtaggctaagtccattctgtgacatcacaactcatgttttaaaaaatacacccacaaagtcaaaccatttaggaaatttcctaaaatttacatactcaaatatgacaactttttagttattactttcttagagcaacttcgaatttacaatcgtagtgaatgaggtgtcatgtaaaatagaactgttatataaaaacaacatttgaattttattctcatcagagcatatagaaaacaattgaagccatgggtatggcagggattgctttaaaaagctgtgcctgataaggggaattggaaagaaaggagacttgggggctgggtgcggtggctcatgcctgtaatcccaacactttgggaggcctaagcaggtggatcaccagaggtccggaggagttcgagaccagcctggccaacgtggtgaaaccccgtcactactaaaaatacaaaaattagctgggcatggtggtgggcacctgtaatcccagctatttgggaggctgaggcaggagaattgcttgaacccaggagacggacgttgcagtgagccgagatggtgccactgcacttcagcctgggtgacagagcaagactctgtcttaaaaaaaaaaagaaaagaaagaagacttggggaatagggagatttaagtggcattaagtaaagcctgcaaatgtgagcagggagtgtcaaggtacctgagtgttcatcagaaatggctgatcgagtgagtctcatcacaatggagctggtgtctgcttctcatttctctaatggccacacctagcacagtacctggtcaatagggactcaatacctgataccccaatgaacagagtaaaattctgccagttcaaacacacgtccatgcccaccaacttccctcgtggagttttacttctttcacttactgtaatgttttgaagatcatccctcctgtgacctgtatccatagtttcttttccttgtgtaactgagcagtactccactgtatgcacagaccacatgggtctatccattctctagctgacggacacttgggttgtttccagttgctgcctatagtgaatgaggctgctgagaacatttatgtacacgtctttttggaacacatgctttcatttcttctagataaattcctagggctagaattgctaggtcaaatggctagtttatgcttaacttctttttttttgcctttcttattcatagaaattacactgatacataatattggacatttctatgaggtgcatgtgctgtttggttccgtgcatccaccatgtcatcatcaagtcaggatatttggggtatggccttgagtatttatcatttctatgtgttgagtatatttcagttctctcttgtagctattttgaaatatacaatacattattgctaaccatagtcaccctactctgctatccaacattagaacacattccttgcatctaactgtaagtgtgtattcattgaccaacctctctgcattcccttcttatacccagagaaggagagaggaaggagggaaaggagctgtggttgggctgaattagggcccagggacggctgtgtcccagtcccgggacctgtccatgtgctgtgttgtgtggcctcagggactttacagatgtgatgatgtcaaggggcctgaggtggaagatgatcctgggttatgtgggtgggtccaaggtggggtctttataagggaaaggaggaggcaggagggtcagagtgacagcaggtgtggggctggaggacaagaaagggagagaaggagggagggtgagagaagacagttggcagggagagagagagagagagagaagagtgggagagagatttgaagatgctgagctctggctttgaagttggaagaaggggccaggagcccagggcgtcctctagaagctggaaaaatcctggaaatggattctccccagagccctcagaaggagcctggcccagctggcaccctgattttagcactctacgattcattttggatggctaacctccagaccagggagagaaccaatgtgtgatgttttaggggtcatttgtgacagcagccacaggaaagtcaaacaggagccatgggagagactccctaggatgcaccgagggtccctccctggccccacccacagaaacacaggcctgaccactgctagtgcccccacccctctaacaccctgatgagcaggaaccatgcaggaggggctgggtgtggctgggccctgttctctcccccgacaccttctcagagaggagctggagccccagaccctgggagcctcacagatattcccaacacaggacctggttttccatttcccaaaatgatgcttcctccaaagatggccagtgactctctgtgccaagcatctgagaaactctccaggtcctagggctgccaggcagtcagctgtgcacatgttggagcccaaatcccatcaatagtgaggccctgggtaaaacacatccccacttttaattatgaggagatgcctggcctcagcattgagaacaccaacttccctcaagtgaaaacttatttaatctcttagaaatgatggagcacaccagcctgaacaacatggtgaaaccctgtctgtaataaaaacacaaaaattagccggacattgcagcatctacctgtaatcccggctactcaggaggctgaggcaggagaattggttgaacctgggagacagaggttacggtgagccaagatcgagccattgcactccagcctgggcgacagagtgagactccatctaaaaaaaaaagaaagaaatgatggagcacctattacccttcttgcactggttcctggggagctcagagcctatcttttgcaagtgtcctgatcctcttgcaggcctttcatgtgtgttttctttctggcttcctcctgtttttctcacacttctgaacctgctgtcacgtgaagaatcaaggtgggcccaaaatgtaagagctcatggatttgatggtgttggagtgtcctggacagtccagctctcggggtggggagttgcgcagagaggaaggagggcattccaggggccagggccagaagcagagggactccaggcccagagtaggatttccaggctgaggaaagagaggccgtgggtgggtagagggtccagaccaggacagggacacagggtgtatctggaggctcagccagaaatagctccctacagaaagcaggcagcgagttgggggttgagctgcaaggaggaaggggaggagggagagaatggagggactggtgtccagtgagctgactcctatcctggcctatttccccaggggacacccctgggagactgtgatcctctcctccaggctactttcccactggtgccaggattcccccagtgccacactgagaacccaggagaagcattagattatatgagagataagaaatgaagagagggagcaggatttctggctgacaaagatatttattgagggtttactgggtacagcgagaagggctgaatggcttgggatgcagagagagacccctcccctgggatcctgcagctccaggcccctgtgggtggggtgggggctggaacctatgaacattctgcaggggccactgacttctccacggtgctcccttcttgcataacctggcagctgtagcttctgcgggacctccactgctcgggcgtcaggctcaggtagctgctggccacgtacttgttgttgctctgtttggagggcgtggtcttctccacgctctgggtgatgagggtaccatctgccttccaggtcaccatcaagattcccggataaagttattcatgagacacaccagtgtggccttgttggcttggggctcctcacaggacggcaggaacagaatgaccgacggggtagtcttgggctgacctgtgtggacagaggagggggtgagagatggcagagggagtgtggggtgttgtggagcgcctctctctgtctaaagtctctgggagggttcatggtgtggccgtctggtccacccagggcctctccttccctcctcattccctcctttccactggagccctctgcagagcagacagccctgtgccttcctaggagcccttcccaagtcacctttcccaggtgtcctggcccagccctttcctctgcagcctcagtttccccgtgtgtacccagggcaggctgtgctccctccttcctggtttctggagtctgagtttggaatctaggggtctccctcacagcacacaaaactgacctggcagggtgtggggaggcccaagcctggcatggcctggagcttcccgtcccctggggcaccaggctatgccccagcctggcccactcagctctcctggtgaagcgtgggctccacccagacacaccctggggctctgccatcgcccctgtccccaccagcccaaccacaggacccttcacatcggctgggttcttggggctgctaacagacttcggggcaccgcagcccccatgcccactccagcagcctctgatacccctggacttcacctgtcagccgtggagttctctgcactcccgtttactccccactagtcacctcctgagtctaaggtgcccttcctcaaatgaaggtgggaggtcgacccttcaacagacaccgggccccagaggtgatgggactccagggacagacacatctctgcactaagagaccctctcctttcttgggactgtccagggagggctgggccttgggacctctcccagtttcacccatccctctgtgtccccatgtcctcacgacccagcagaggccacagagctacaccctagacccagagccctctctgccctccattggtctccccttgggatgacccctgtgtccacaggcccccgtgtggccctcccagcctggataggcatccagccctcagcctagaccctggggtcccagggactgtctctaaggccaccgtacggcccctcatcagaaccggcctctgtccctcattcagacatgtgccctgcccaatcccagcccaggccccaggaccaggctgtgtcccactgttggaacctgaaggcggctgctcccactgtgggagcccttcatgccagttaacctgagactagcccgcttcccccagaccctatggagaaaggaagggttccgtgcttaaggcttggagggcaaaggggaagaagccccagagaacgaaaacagatttttgcagagacaggagagggtgcgacaggctagggaaagttgtgagagccacgtacctaaaacagtgagctgggtcccactgccaaacacatgcttcactgaattatgcttggattgaaacccccagggccagcatctggcgccagtccaggagccacgctggagcaggaacctgctgggtgtgaggggcacagggctgcagtgtgtaggctgtgacccaggcacagggcaggggggtggccagtatcccagtagtgtcccccagtagtgtctctgtgcctgttctctatctgaggcaggtgccgcccacagccttggagtcaccccagcatatgtccccctctctgaagctgttggtgctgatggcaacgctgggcccagtaggtcccagcaactccctgagtgacacatcccctcaggcagctgtgccgtgtggctgaggagtcctcagctggctcggacctgtccacctcacttggcctcattttaagggcctctgaaatctgccacaagtgtctgcagtcaagccaagttgacttgctccctggaccaggacattgggtcattcctgactcaagaggagagtcctctgcttttgtatctacccatggagatgcagctcagtctcactttgttcatgaagccttttctgatcattcattccgtctgtccgtccatccatctgtccatctattcatctgtctttgcatccatctatcatctgtccattcatccacctacctatccatccatccataaatccatcctgtctaccaggcactgtttcgtgtactggggacatggtgtggtcccccaggctctcacccccatccatcccaggtcatggccaacaaggccctcctcatggtcatgtccaaggtccttctgctgtacctggtgtctctgctggatgtgacacagagctggcccctccttccagtgactcttttccccttgaggtctgactcccctttcctcttccccggcatctgtttctccacggcccatgcctggctgctgactccccagacccccacccagacctctttcttggccgtctttacactctgtgacccccactattgcccacatggtgaggctggagtctatctcagctccaaaccctctcagctcctcaactgcctactgaccttgcccagtgggctacccaacaggagtctcaaactaatcacttccagagatgaccaccttcccccagcccaactcattttctgtcttcatctcatcacaatgaccatgggcggtctcaaccccacagccagaaacctggagtccctggattcagtcacctcgcctcccacactgaaatggcttctgtgtacttagctactgcatctagacattcctttttttttttctttgagacagagtcttgctctgtcacccaggctggcgtgatctcagctcactgcaacctctgcctcccacgttctagacgattctcttgtctcagcctccagagtagctgggattacaggcatgcaccaccacacccggctaattttgtatttttagtagaggcggggtttcaccatgttggccaggctggtctcaaactcctgacctcaggtgattcccacgccttggcctcccaaagtgctgggattagaggcatgagccaccgcacccggtgacattccctttaaagctaaaataagactcaatataattaagaaacaataaaaccaccttctgagactctaaaaccacaaaaagtgtgaactttgcttttctggattttaatctcaaactctctttggtacaaggatttggtgttgaactggggcttactgggtgcaagttccctgccaggggttcagaccagagtgtttctaccttagaagctggtctagtaattggtattggttttgtgtggtaaatataagatttttaaaatttatttgttgacacagggtctcgctctgacacccagactggagtgaagtggcgccatcacagctcactgcagccttgatctcctgggctcaagcgatcctcccacctcagcctcctgagtagccggcaccacaggcatgtgctaccacgcccagctaattttcttttaatatttttttgtagaaatggggactcaccatgttgcccaggctggtctcgagctcctgggcctcccaaagtgctgggattataggcatgagccaccatgcccagtggtattttatttttcttttcctttttttttgagacggagtcttgctctgtcaccaggctggagcgcagtgatgcgactcagctcactgcaacctccgcctcctgggttcaagcaattatccggcctcagcctccaagtagctaggactgcaggtgcgtaccaccacacctagctaatttttgtacttttagtagagtcagggtttcaccatgttggccattatggtctcaaactcctgacctcgtgatccacccacctcagcctcccaaagtgctgggattataggtgtaagccactgtgcctggcctttatttcttattttcaaaaaaactttttttttttttttgagatggagtcttgctcagtcacccaggctggagtgcagtggcggcatcttggctcactgcaacctccacctcccgggtttaagcgattctcctgcttcagcctccaagtagctgggactacaggcgagtgccaccacgcctggctaatttttgtattttcactagagatggggtttcaccatattggtcaggctggtcttgaactcctgacctcgtgatctccgtgcctcagcctcccaaagtgctgggattaccggcatgagccaccacccccagcttttttttttcttgactgagtctcactctgttgcccagcctggagtgcagtagtatgatctcggctcactgcaacttccgcctcctgagttcctgggttcaagcaattctcatgcctcagcctctcaagtagctgggactacaggcatgcaccaccacacccagctaacttttctattttttacagagacagggtttcaccatgttggccaggctggtctcgaactcctgacctcaagtgatctgcccacctgggcctcccaaagtcctggaattacaggcgtgagccaccatgcccagccccaaaaaaatctttactcttttaaaactatgagaatataacaatgaagacaattaaggaatagacaagtgcatttaagaagtgcaatattgggctggcctccgtggctcacacctgtaatcctaacactttgggaggccaaggtgggcagattgcctgagctcaggagtttgagaccagctttggcaacatggtgaaaccccgtctctactaaaaatacaaaattagccgggcatggtggcgcatgcctgtaatcccagctactcgggaggctgaggcaggagaattgcttgaacctggatggcagaggttgtggtgagccaagattgtgccattgcactccagcttgggcaacaagagtgaaactctgtctcaaaaaaaaaaaaaaaaaaaaaaaattagctgggcatgggtgtgcgcctagtcccagctactcaggaggctgaggcagaattgcttgaacctgggaggtggaggctgcagtgagctgagatcgtgccattgcactccagcctgggcaacaagagcagaactccatctcaaaaaaaaaaaaaaaaaaaaaaagaagtgtaatattggctgggagtggtggctcacacctgtattcccagaacttttggaggccgaggcgggcggatcatgaggtcaagagatcgagaccatcctggccaacatggtgaaaccccgtctctactaaaaatacaaaaattagctgggcgtggtagcacacagctgtagtcccagctactctggatgctgaggcaggagaatggcttgaacccaggaggtggaggttgcagtgagccaagatcgtgccactgcaccccagtctggcaacagagcaagactccatctcaaaaaaaaaaaaaaaagtatatttatctctccctctctctcctgctacatagagccccatttccttttttttttttttttagacagagtttcacgcttgttgcccaggctggagtgcaatggcacaatcttggctcactgtaacctctgcctcccagattcaagccattctcctgcctcagcctcccaagtagctgggattacaggcatgcactaccacgcctggctaattttttgcatttttagcagagacagggtttctccatgttggtcaggctggactcgaacttctgacctcaggtgatctgcctgcctcggcctcccaaaatgctgggattacaggtgtgagccaccacgcccagctccatttttattattgcagtaaaacatacatagcatcaatatttccactttaactatttttaaaagtacagctccgtggcactaagtacattcacactgttgggcaaccttcaccaccatccatctccagaactctttcatcttcccaaccagaaactctaaacccattaactacagtcccacattcttccttccctctcgtcccagtaacatcaaatctactttttgtctatgtgaatttgcctattctaggtacctcataaaagtggattcaaatgacatttgtccatttgtgtctggcttatttcactaagtataatgtcttcaagtttcatccatgttgtagaacaggcaggtgcctgtaaccccagctactcgggaggctgaggcaagagaatcgcttgaacccaggaggcagagcgtgtgcacctgtaatcccagttactggggaggctgaggcacgagaattgcttgagtccaggagactgaggttgcagtgaactgagatctcaccactgcactccagcctgggtaacaatgagactctgtctcagaaaaaaaaaaaatcagtgctattttatcttcagtgtgttatgattaaacttctataattgtctattgcactaagtttattatttgtattaaactttagattcatggggtacatgtgtaggtatgttccatgagtacattgcaaaatgctaaggtttgggcttctagtgaacccatcacccaaacactgaccatagtacccaataggtagtttttcaaccccttccccctccttccctccccacctgtggagttcccagtgtctgttatttccatctttatgtccatttgaaccaattgtttagctatttatttatttattttatttttttgagacagagtctctctcctttgccccggctggagtgcagtggcgccatctcagctcactgcaacctccccctcccgggttcaagcgattctcctgcctcagccttctgagtagctgggattacaggcacgcgccaccacaccaggtgaacttttgcaattttaatagaaatggggtttcaccatgttggccaggctgatatcaaactcctggcctcaagtgatccacctgctttcccctccccaagtgctgggattataggcatgagccactgcaccaggcctatttttaaataatacttaattttctttcattttatttgctaataatttacagtagaattatataatgatgttgattttttttttgggggggacagggtctcactctgtcacccaggctggagtgcaatggctcaatcatgctttgctgcagcctcaaattcctgggctcaagtgatcctcccatctcagcctcccgagcagctgggactacaggcacgcaccaccatgcccagctaatttttctattttttgtggaggcagggtcttgctatgttgcccaggctggtctcaaactcctgagctcaagcaatctgcctgtcttggcttcccaaagtgctgggattacaggcataaaccactgtccctggcctaataatgtagaattttacttaatgcttcataatatgattttaaaagtttgtatctgaaatgtatttaaatatgtagtttgatcttttgaaaaacatttgaattcctaacagattataacatactagttgtgcccaggaggtggaggttgcaatgagcagagatcacgttgctgcactccagcctgggtgacagagcaaaactctgactcaaaaaaaaaaaaaaaaaacaactagttgtgttagggttcaaaccagagaagcagaatcagtagcagagatacacagattcatatataaacatatagggacacacatctgcatagatttataaaaggttggcttctggccgggcacagtggctcacacctataatcccagcactttgggaggccgaggcaggcggatcacctgaggtcaggagtttgagagcagcctggccaacatgatgaaactctgtctctactaaaaatacaaaaattagccaggggtggtggtgcatgcctgtagatccagcaactcaggaggctgaggcaggagaactgcttgagcccaggagttagaatctagccttagcagcctaacaagaccttggttctaagaaagatttaaaaaatagtccggccgcggtggcttacgcctgtagtcccagcactctgggaggccaaggcgggtggatcgcttgaagccaggagttcaagaccagcctggccaacatggtgaaaccctgtctctactaaaaatacaaaaatcagttgggcgtggtggcacatgcctgtaatcccagctgctcaggaggctgaggtggaagaattgcttgaatctgggagggaaaggttgcagtgagccaaaatcacgccactgcactccagcctgggtgacagagcgagaccctgtctcaaaaaaataagaaagattttaaaaataaaacacttttaatattttaattatttcttcctttagcagcacattgagaagttgagtaaactttttaaaacagttttagaattacagacaaattgccaagatagcacagagttcacatatacccttgtacctggcttccttgttatgaacatcttaaattaatatggtaaattgctacagttaaaaaacctggctgggcatggtaccgcacgcctatgatcccagcactttgggaagccaaagtgggaggattgagtcttggagttcaagactagcctgggcaatacagtgagaccttgcttcacttaaaaaaacatgtaaggtcaggcgcggtggctcacgcctaaaatcccagcactttgggaggccgaggcgggcagatcacctgaggtctggagtttgagaccagcctgaccaacatggagaaatcccgtctctactaaaaatacaaaattagccgaatgtggtagcgtatgcctgtaatcccagctactcaagaggctgatgcagaagaatcgcttgaaaccaggaggcggaggttgcggtgagctgagatctcaccactgcactccagcctgggcaacaagagtgaaaatccatctcaaaaaaaaaaaaattttttttaatgaaaaaatttttggagagatgtggtcttgccctgttgcctaggctggagcacggtggcacagtcacagctcactgcagcctcaaactcctgggctcaagcaattctccctcctcagcctccctggcagctgggactataagtgcataccaccatgctgactaaaataaaaaacaatttttttagagagatgcggtctcactatgttgcccaggctagtctcacacttctgacctcaggatcttcccaccttagcctccgaaagtgctaggatgtgataccatgcctggccccaataaaccaatactgatacattattatcaactaaggttcatcttgattcagatttctttactatttcccctaatctccttttcctgtcccaggatctcatccaggacaccatactatgtttagttcttaagtgtcctcaggattgctggagtgcagtgactccatctcggctcactgcaacctccgaccactgagttcaagcgactctcctgcctcagcctcctgagttactgggattacaggcacctgccaccatgcccggctaatttgtttttttgtttttttgtttgttttttttttgagagggagtctccctgtcgcccaggctggagtgcagtagggcgatcttggctcactgcaacctccacctctggggttcaaatgattctcctgcctcagcctcccgagtagctgggattacaggtgtgtgccaccacacactattttttttttttttgagacggagtttgagatggggtttcaccacgttggccaggctggtctcgaactcctggcctcaggtcatccacccacctcagcctcccaaagtgctgggatcacaggtgtgagccacccgcccagcttggctaggtttttttttttttttttttttaatgcagtagctggggtcttgctttgtgcccaggcctcccaaagtgctaggattacaggcatgagctgccgctcctggcctaggaggtcactgtgataccctgtttgaaggggacagggcctggacagggcagaggctgtgataggagccccctcttcccttcccatctatgactctcagtgtccttgcccagttttctccacttccattttattttttatttttagagacagggtctcactctgttgtccaggctggaatgcaggggtgtgatcatagctcaccgcagtctcaattcctaggcgcaaatgatcctctcacctcagccttacaagcagctgagactatatgcatgggccaccatgctgggctagttattttattactgggtagagatggggtctccctgtgttacccaggctggtgtcaaactcctggtctcaagcatcctcgcaccttgcctttccaaagtgctgcgattacaggcgaccccgctctgcctctccagtccctgaccgtccccactggccagccctggaaagcccagcaacaagggagccagggtggggcaggaaacacgtagcagcctcctctcgcgcccactttatttgggggcaggcgtgggaggacctaggcctgctgtgcctgtagtagcgcccgcacctggcagatctgccagtcgacgctggagtgctcagtgccatccagggcactgtactgctccacgctgtgcccgtattcccacatgcggctcatgtcgcctgagaacagggggctaaagagaggaagaggtgggccagggtgccaggccacctggagacagcgtggggaagggggtgggccgcacctgatggtctgcagctcccgtagtgacagctggttgagggcaacccccttggtctcggccatgaacatggctttccttggaggcctcgtgggcctagtggaatggcatctgagtgccgggcagaaaggtggcactgaggcagcttcgtccatgccctaatttgcctccactgcctgcaccctgtttttttttttttttttttttttcgatacaaaatctcactctgttgcccaggctgaagtgcagtggcctgaactcacctcactgtaacctccacctccctgtgggagaagaggagcaggggctcaggtggaggctcgggcaaggcctgcctgtgacactgggaccctgcaggcctgggtcacccctggaaaaagtgtcgtcctgcagcactccacctgaatgagggatccagtgatctcccaggacaaatcagtcttaagggaaaaagaggatggaagtggggccatgtgaaccaaggactaggtctgagctgtggggcctccggaggtgagggtttgccaggaacacccgaaggctgagcctctgtcactcagcatctccgagctgaggccagaacaggggagcaggcccgtgttgggtatgacttggccatgggaggtttcgtttgaggaccccagaaatagctggggctcattcaagggctgctctgaccagctgagacaccctgctcctcattcaagtaggtagggcagaggcagaggtgctgtgagtgatggtcctgttttcttactgtttttattttcagagacagggacttttctgttgcccagggtggagtgcagtggcacgatcatagctcactgctgcctcgatctcctaggctcaagtgatcctcctgcctcagcctcctgagtagttaggactacagagacatgccactatgtccagctaatttttaattttttgtaaaaatggggtcttgctatattgcccagggtggtctgaaactcctgggttcaagcaatcctcctgccctggcctcccaaagggctgggaatacaaatgtgagccaccacacctggcctgttttttgttgctgttgttgtttttgagacagcgtttcactcttgttgcccaggctggagtgcaacggcacggtcttggctcactgcaacctccgtctcccaggttcaagattctcctgcctcagcttcccaagtagctgggattacaggtgcccgccaccacgccaagctaattttttgtatttgtagtagagatggggtttcaccgtgttcaccatgttcaccaggctagtctcaaactcctcacttcaggtcatccacccgccttggcctcccaaagtgctgggattacaggcgtgagctactgtgcccggcctgttgttgttttaaataaaccagctttactgagatctcattcacaaataatttacccattttaagttcacattgtagcgtacaaccatcaccaaaaccaattttagaacattttcatcaccccataaagaaattctgtactcaaggccaggcattgtggctcaagcctataatcccagcactttgggaggccaagagggaagaatcacttgaggctgggagtttgagaccagcctgagccacatagtgagacaccccgtttctacaaaaaattttaaaaatttgcagggagtggtgcacacctgtggttctagccactcagaaagctgaggtgggaggatcatctgcgtccaggagtgtgggcctacagtgaactattactgaaccactgcactccagcctaggtgacagaacaagacctcatctctaaagacaatttaaaaagtcacaaagttaaaaattaggccgggtgcagtggcttatgcctctaatcctatcactttggcaagacaaggcaggcggatcacctgagctcaggagttcgagaccagcctggccaacaaggcaaaacccatctctactgaaataaatactaaaattcgctggatgtggtggcgcacacctgtaatcccagctacttcggaggctgaggcactggaattgcttgaacctgggaggcagagtttgcagttagctgagatcgtgccactggactccagactaggcgacagagtgagaccctatctcaaaagaaagaaaaaaaaaattaaagaaaccctgaactcagtagcagacactccctgtttctcctagcagccccgccccacctacagggtgacaatttgtgtgcccttgtttccccccaggtctgtgaaccaggggtcacagggagttgaggaagaggaggggtctctgacaacacatcagagactcctcagcagctccccatccaggtctgcaaggatcaaatccagtcccaaagacaccaggtgaaagcctgggatgaggccaatatgaggcagcctttggctcttttgccagatgggctagatggggacgcggagcatgggatgggagacgtggggcacaggcagggtagcaggtgagtctggctgctccaggcacagccaagctagtgccttagcttcctgcccttaaatccgcaaagggtgagttttctattttatttttgagacaagggtctcgctctgtcgcccaggctggcagtggctcaatcttagctcactgcaacctctgcttcctgggttcaagcagttgtcctgcctcagtctcctgagtagattggattacaggcgcccaccaccacacctgcctaatttttgtatttttagtaaagataaagagtttcaccatgttggccaggctggtctcgaactcctgacccacctgcctcggcctcccaaagtgctgggattacaggcatgaacccctgcaccggccccatgaagggtgagttttccttgccagctgagctagactgccatgggaatattgccgtctgcaggaaatgccccactcctggctgctctgcctcgaccctggagttttgggatgccccggtcccccagggcctggcacccccaccctgttcacccctgccacctaggtctgctgttcaggctgccatcacacctctctctgccccctgggtgtcccttgggtactcacacctctgcccaatcccccatagtcctgatgagctcccagaggaggcccgagagcgtgaagcaggtctgccacatccacaacctgaggtccgtgaccacctgtgcgaaaaggaggtagtgctcagggaaactgacatattacttccctggggagccaggaccactgctgagctctgactgccccctgggctccccaaggttgggacagcatggagttggggggtggaggggctagaggcacctggtcattccagctccatcccatgtgcgccttccctgcggtttcaccaatgatcacagaatgatggtgctaatgctcaaagtggccccgcgcaaggtggagaggggaggccaggaaggcagtggggctgcagggttcgtaccttcaggtggcacttgttggctgtgtggatgtcctcatcattggggttgagtttgaaggtgccctgggcccactcctcaaccacctatagcacgtagcagcaataccaggggtcaggtgagcaggcatcagcagccgagagcccctgccctgatcccaccttattcctgatgactgactgtccctgtccaggagctgagtcctggaagtgcaccctgggagggggcatctcgagcccagcacacctttacccataagccatgtgggccacagggatcattaaaggagagaagaggtcaaggcacacagttaaacagcacttgagtatataattagttcaacgtaaaaccatccatctcggccttggcgaggagccctgccttctccatgccccggctgtaggctctgctgccttgaatatccacctcccacaggtgctggtcgtaggctggatgtgttgaacttctccatgatggggtccactgcacccactctggccaggagagcagaacaattagtctctcctccaccatccagaacagtgcctcttgcagagtctccttgggaaacttaccaagtctgatggtagcaggggcatgggaccatcctaactgggaagacaaaaaggctgagaccttcccagagtcaccttgggagtgagcatgggaacatggctgaacaccaagacagagccaggctggactgcagtagtgcaacctcggctcactgcaacctccgcctcccgggttcgtgagattctcctgcctcagcctcccgagtagctggtattacagacacgcaccaccacacctggctaatttttggatcattagtacagacagggtttgaccatgttggccaggctggtcttgaactcctgacctcaggtgatcctcccatctcggcctctgaaagtgctgggattatgggcatgagccactgcgtctggccttgaagttggggtctttcccaccacatggcaccaccccaaggagatggtggcagggcccgaggcaccccgggaccagagcagagcttctggaacctttcctgccactgaccaaggtgccaggtgccatcctaattgatgacacaactctctggggtaggcaccaatacaatcccactatgaagagggggaaactgaggcacagggaggcatgcagcctgcccttacccggggagggagagccagggctgcagcccagcagtttaaagtcagaacccatgctcttcacccctgttccaccacggcctctgagcttggctctggtgtcctgaacttttgctgcagggacaggcaaggaggcactgacggtctccaccaagcttaagtgccctgcaactctctccctcacagcttggagtcagactaagagactaagatcccaattcctactgctcccttggctctgaagagcactctgacaccccccattgtcactggccttctaggaggtcactgggtgacccttactccccaggagccaagggtagagagatggtacgtaggcatctacattttgttcttatttttgagacacggagtctcacttggtcgcccaggctggagtgcagtggtgcgatctcggctcactgcaacctccgtgtcccaggttcaagccgattctcctgcctcagcctcccaagtagctagaattacaggtatgtgccatcacacctggttgagttttgtatttttagtagagacgggatttcaccatgttggccagactggtcttgaactcctggcctcaagtgatccacacacctcagcctccaaagtgctgggattacaggcatgagccaccgagcccagcccattttgttatttaaaaaaaattttaattcttttttagagacagggtctcactctgttacccaggctggagtgcagtggtgccatcacagtttactgtggcctcaaactcctgggctcaaccaatcctcctgtctcagcttccccagtagttcggactacaagcatgtgccaccacacctatacatttttgaaaaattttgtagggctgggtgcggtggctcacacctgtaatcccagaactttgggaggccgagacaggtggatcacgaggtcaggagatcgagaccatcctggctaacatggtgaaatcctgtctctactaaaaatacaaaaattagctgggcatggtggtgctcgcctgtagtcccagctactcaggaggcttggcaggagaatcgcttgaacccgggaggcagaggttgcagtgagccaagatcgtgccactgcactccagcctgggtgacagaaggagactctgtctaggaaaaacaaaaattttgcagaaaatatgttgagacaggatctatgttgcccaggctggtcttgaactcctgggctcaagcaatccttctgcttccgaaagtgctgggattataggcataagccaaggcgctggccacatctatgttttgaaagcgggcagaggccagggcatgggacagatcggggaagggtacagggcacctgggaagtagtcctagtgcccaggactgggggggagggtggggtggaggtgggcacgtcacttgactgacatcctttttgtggaagggactctacaatggccaatagggacatatgtcctcctctgtccccctgcaatgccccagacctctgttaaccacctggcctggggcctattataaaaactcagggttgggaggcccagatgggtggatcccttgaggtcaggagtttgagaccagcccggccaacatggggaaaccctgtctttactgaaaatacaaaaattagccaggcgcagtggcgggcagctatagtcccagctacttgaaagtctgaagcaggagattcacctgaaccctggaggtggaggttgcagtgaacagagatggcaccattgcactccagcctgggtgacagagcaagacatcttctgaaaaataatacagtacctatgtgatagccttgttttgagcattcaatcaggtaacatttgcaaattgcatgcataacatggtgcctggtgctcaggaaggaattgggaaatgccagcagttactaagggagggcaggcaggggacaggacatgtttcagctccactcctggttcttgtgtgcacccagagacctctaccgtgctctggccctgagctgtgaactgacccctccatgcccaacagccccagctgccaaaggactctgccctgcagagggagcctccgcccccaccccgtcttttgagctggtcctgccccttaccccacaagctgccccaccaagcctagatctccagcaaagcactaggtggggcctggatctttctgatcactggggccagccagtcagaattggagccagcctgcccctcagctgggagcctggcagtacctcccccagcggggtcctgggccaccctgcctgtattattagtaataaaaactgctaaatatgcaaggctgcagccaaaccaattagtgccaacctacaggaaggcctggggcaggctgaggtcacctggagtgctgggctggtccaacggcagaccactctgctctaggaccaagcgcctatccttactggcaggcataataggatgccactgggagatcagagtgaggtgcctccccttgggcactgaggagaagggaggcccagtgtggtagcagaaggtgctgctccgagccaggacacttctgggccagaatggtctcttcagggccaggggatggggcactgagttgggctgggttgaatgagcaacagtcaaggtcgaatgtacacgggaaatatcaattttggttttggggtttgtttttgtttgtttgtgttggtttgttttgagacagagtctggctgttgcccaggctggagtgcagtggcaagatcttcactcactacaacctccacctcccaggttcaagcaattctcctgcctcaacctcccgagtagctgggattacaagcgcttgccaccacgccaggataatttttctatttttagtagagatgtggtttcaccatgttggccaggctggtctcaaacttctgacctcgtgatccacccatctcagcctcccaaaggtgccggaattacaggcatgagccactgcacccagcccgcctggcccattttgtttttcttttcttttctttttttttgagatgaagttttgctcttgtcacccaggctggagtgccatggcatgatcttggctcactgtaacctccacctcccgggttcaagtggttctcctgcctcagcctacatagtagctaggattacaggcacccaccaccacccccagccaatttttgtatttttagtagagatggggttttaccatgttggccaggctggtctggagctcctgacctcaggtgatccgcctgccttggcctcccaaagtgctgagattacaggtgtgagccacccctcccggccccttgcctggcccaatttttaatatattacaggattgtggcaaccttgtgttgagctagtgtagtattggtgctatttttccaacagcacgtgctcacttggtgtctttgttcaacatttcggtaattcttattgcatttcaataattcttatcgcctcccaaattgctaggattacaggcgtgagccacggctcctggctgtttttttgtttttgttttgttttcttttgttttttttgagatgagatggagtctcactctgtctccaggctggaatgcagtggcacgatctcggctcacgcaaactctgcctcccgggttgaagcgattcttctgcctcagcctcccgagcagctgggactacaggggtgagccaccacgtccggcctggctgtttctttgtcctcctcctcctcttcctcctccgtttctttttcctcctcctgtttctttttcctcctccatttctttttcctcctcctcctcctccatttcattttcctcctgctcctcctcttccatttcttttccctcctcctcctgctccatttcttttccctcctcctcctccacctcctcctcctccaactccttctgctccgtttctttttcctcctccttttttttcccctcctccgcttcctcctcctcctcgtaggcacgagacaccatgactggcctggttgtttccttttcctcctcctgctcctcctccacctcccaaattgctgagattacaggcatgagccactgcacctagctgtttcttcttcttttttctcctcttcctcttcctcctcctccattttattttatttttagatatggagtctcactctgttgcccagactggagtgcagtggcctcactgcaaccttcacttgcctggattcaagcaattctgcctcagcctaacaagtatctggaattacaggcagcagccaccatgcccagataatttttgtatttttagtagagacgggatttcaccatgttggccaggctggtctccaactcctgacctcgtgatccgcccacctcggcttcccaaagtgctgggataacaggcctgacccactgcgcccagcccgcctggcccgtttcttttgttttctttttttttttcttaaaacagagttttgctcttgttgcccaggctggagtgcaaaggtgcgatcttccctcaccgcaacctccacctcccgggttcaagcgattctcatgccttagccttccgagtaactgggattacaggcacttgccaccacgcctgcctaatttttgtacttttagtagagacaaggtttctccatgttggccaggctggtcttgaactcctgacctcaagtgatccgccctcctcggcctcccaaagttctgggattacaggcgtgggtcactgcgctgggcctacagctcatttcttaccacataaagttttgcgcctctccacaaaactgccatcagggatgtccccagaaaccattcatcccaggcgccacgcagagaagagctgcttgttctccttttccctttacctcttccatctcacctcatcttgttcattcattcatcccttttccattctcacttttaagcgttaacctttcaaaaccctgttttcccctataagtaatgtcttgtaactcccgcaatcaccatatccttctccaacccaccaaactgccatcctgagtttatggtaagtccataaactaagaagaaatgggaaacattcattgcaaacctggcagcccctcatccacccaacgtgacagcacagatgttcttgtctttgaagacccccttttttttttttttaagacaggtctcactctgtcaccctggctcaagtgcagtggtgtaatcatagctcactgcagcccccaactcctgtgctcaggcgatctgcctgcctcagccacccaagcagctggaactacaggaacacaccaccacacctagctaatttgcttactttttgtagagaaggggtcttgctatgcttagcagactggtctcgaactcctggcctcaaatgatcctcccaccttggcctcccaaagtgctgggattacaggcatgagtcaccatgcccagtctaaagacttttaaatgctgccatattcaagatgtgttgaaactcacctgtattcgatgagcctgctttttgcaagtgagtaatataaaacagactgaaataccttaagcttctcaggctttgtaccttcctaaagtaaatccatgaggtccagtttttccttcctccttggctatgaaatagacaagaaaaaggcaagctagccatttacatctcactatagcagactctcctgtttgctttttgactgtatttgggaagcaggggcctgactgctttcctacttactaagcacaactcacttttcctaggaaatcctcaacgcaacctgcatggattaaaccagctcctcgctttgtttccaatattcttacaatcaaagtgtccagaatgggcaaggcaacctgaaaaaatgaggacgggtacattatcctatgagccaaactgccgcttacactggttagtcatgaaatcggcaaaattccagatgagctctccaaccacgtattttctgagtttttgatccagacccagatggtactgctctagcagacttttctggtagtcttcactgaacatcagaggtggatcctgggattcaaggcaaagagaatttaagagtcagaactggcagaattgtaaatgttagataaaaaataaagatccacttgatggtgaccaaaatatctgtcctcgcagggggctatagtgactgcaggactcactgatgctagggtaaagacagccagggaatgatgtaacccagagttaaaaaggaggtttaaaaaaacaacatattaattagtaactgctttatttataaatgtaatctgatattcactttttcttacttttccgtctctatctgctggtacagtcttaaggctgaactacgttagaagtaaaaatatgactttgggccaggtgcactggctcatgcctgtcatcccagcactttgggaaactgaagtgggaggactgcttgagcctaggagttcaagaccagcctgggaaacatagcaagaccccatctctacaaaaagtacaaaaattagccaagcatggtggaacacaactgtgctcccagctacttgggaggctgaggtgggaggactgcttgagccctggaggtcgaagctgcagcgagctgtgtttccaccacggcactccagcctgggtgacagagtgagaccctatcttaaataaataaataaatgtatgtatgtaaaattaaattaaaccaggctgggcatggcagctcaggtctgcaatcccagcactttgggaggtcgaggcaggaggatcacttgagcccagaagttcaagaccaccctagacaaccagtgagacccagtctctacaaaaagtctaaatattagccacgtgtggtggcacatgcctgcggttccagctacttgcggggctgaggagggaggatcgtttgagcccaggaggttgagcagtgagctgtgataacgccactgcactccagcctgggcaacacagtgaggctgtctcaaaaaaaaatttttttttaattaaactaaataaagttatcctagtcatatgtcaagacctcaatagccacatggtcccaaaacctctggataaaacctaattcccaaaacctgtggatattaccttatacaacacaagagtgactaataccttaagtggaaaagtatgttaaagattttttttttttttttgagacagagtctcactctgttgcccaggctggagtgcaatggcgtggtctgagctcactgcaacctccgcctcccaggttccagtgattcttgtgcctcagtctcctgagactacaggtgttcgccaccatgcccagctaattttttttgtacttttagtagggatgaggtttcaccgtgttgttcaggctagcctcgaattcctggcctcaagtgatctgcctgccttggcctcccaaagtgctgggatcacaggtgtgagctaccctgcccggccttttttgcatttttttttttttttttttgagagtgagtcttgctctatcacccaggccggagtgtgtggcacaatctcggctcactgcaatctccacctcccaggttgaagcgattctcctgcctcagcctcctgagtagctaggatacaggcatgcgccaccatgcccagttaatttttgtatttttagtagagatggtgttttactgtgttggccaggctggtctccaactcctgacctcaagtgatccaccctccttagcctcccaaagtgctgggattacaggcatgagccaccgcacccggcctaaagtatgttaaagattttgagaggaggagatgatcctggattatctagatgtgccctgaatgtgaccacagtgtccttgtaagacagacacacagaggagaggacacacagcagaggagaaaccagtatgaccatggagacagagactggagtgaggcagccacaagccaatgaatgctggcagccacaggaagtgggaagagactgtgaaaattgtcaaaatagagctgcggccacacacagtggctcacacctgtagtcccagcactttgggaggccgaggtgggtggatcacctgaggtcaggagttcgagaccagcctgactaacatggtgaaaccccatctctacaaaaatacaaaagttatctgggcatgatggcgggtgcctgtaatcccagctactggggaggctgaggcgggagaattgcttgaacccaggaggcggaggttgcagtgagccgagattccgccactgcactccagcctgtgcaacagagcaagactccatctcaaaacaaaacaaaacaaaacaacaaaaaacaactctgaaaaatagagccagggaaaggccatgaagagaggactctcgtgcacaagtgccccattctcggctgggtgtggtggctcatgcctgtaatcccagcactttgggaggctgaggtgagaggattgaggtaagaggattgcttcagtccaggaggctgaggctacagtgagccttgacagtgcaactgcactccagcccaggtgatagagcaagaccctacctcaaaaacacaactcacaacattacacaaaggccatcacaaccttacacaaaaaatacttctgcaaagacatctgcccaggagtggcctgtccagcctcagactagtgtcacccttatcactgatcctagtagccaaggatgataattccaaaacagttatataccaaagctaagctatgaggaagcaaacacataagaatgatataatgggccgggcgcagtggctcatgcctgtaatcccagaactttgggaggctgaggcgggtggatcacctaaggtcaggagtttgagaccagtctggagaacatggtgaaaccccgtctctaccaataacacaaaaatcagccaggcatggtagtcccagctactcgggaggctgaagcaggagaacctcttgaactgggaggtggaggttgcagtgagccaagactgcaccattgcaccccactccagcctgaaagacaagagcaaaactctatctcaaaaaaaaaaaaaaaaaagggtctgggagccaagatggccgaataggaacagctccagtctacagctcccagcatgagtgacgcagaagacagtgatttctgcatttccaactgaggtaccgggttcatctcactggggagtgccagacagtgggtgcaggacagtgggtgcaggacagtgggtgcagcgcactgtgcgtgagctgaagcagggcgaggcatcgcctcacctgggaagtgcaagcggtcagggaattccctttcttagtcaaagaaaggggtgacaggcggcacctggaaaatcgggtcactcccacccaatactgtgcttttccaacgggcttaacaaacggcacaccaggagattatatcccgcacatggctcggagggtcctacgcccacggagcctcgctcattgctagcacagcagtctgagatcaaactgcaaggcggcagcgaggctgggggagaggcacccaccattgctgaggcttgagtaggtaaacaaagcagccgggaagctcgaactgggtgaggcccaccacagctcaaggaggcctacctgcctctgtaggctccacctcttggggcagggcacagacaaacaaaaggcagcagtaacctctgcagacttaaatgtccctgtctgacagctctgaagagagtagtggttcttccagcacgcagcttcagatctgaggatgggcaaactgcctcaagtgggtctgtgacccccgagtagcctaactgagaggcacccccagtaggggcagactgacacttcacacagccgggtactcctctgagacaaaacttccagcagaatgatcaggcagcagcatttgcggttcaccaatatccgctgttctgcagcgactgctgctgatacccaggcaaacagggtctggagtggacctccagcaaactccaacagacctgcagctgagggtcctgactgttagaaggaaaactaacaaacagaaaggacatccacgccaaaaacccatctgtacgtcaccatcatcaaagaccaaaggtagataaaaccacaaagatggggaaaaaacagagcagaaaaactggaaactctaaaaatcagagtgcctctcctcctccaaaggaatgcagctcctcaccagcaatggaacaaagctggacagagaatgactttgacgagttgagagaagaaggcttcagaagatcaaactactcggagctaaaggaggaagttcgaaccaatggcaaagaagttaaaaaccttgaaaaaaaattagacgaatggctaactagaataaccaatgcagagaagtccttaaaggacctgatggagccgaaaaccacggcacaagaactacgtgacgaatgcacaagcctcagtagccgatgcgatctactggaagaaaaggtatcagtgatggaagatgaaatgaatgaaatgaagtgagaagtttagagaaaaaagaataaaaagaaaggaacaaagcctccaagaaatatgggactatgtgaaaagaccaaatctatgtctgattggtgtacctgaaagtgacagggagaatggaaccaagttggaaaacactctgcaggatattatccaggagaacttccccaatgtagcaaggcaggccaacattcaaattcaggaaatacagagaacgccacaaagatactcctcaagaagagcaactccaatacacataattgtcagattcaccaaagttgaaatgaaggaaaaaatgttaagggcagccagagagaaaggtcgggttacccacaaagggaagcccgtcagactaacagctgatctctcagcagaaaccgtacaagccagaagagagtgggggccaatattcaacattcttaaaggaaagaattttcaacccagaatttcatatccagccaaactaagcttcataagtgaaggagaaataaaatactttacagacaagcaaatgctgaaagattttgtcaccaccaggcctgccctaaaagagctcctgaaggaagcactaaacatggaaaggaacaactggtaccagccactgcaaaagcatgccaaattgtaaagaccatcgaggctaggaagaaagtgcatcaactagcgagcaaaataaccagctaacatcataatgacaggatcaaattcacacataacaatgttaaccttaaatgtaaatgcactaaatgctccgattaaaagacacagactggcaaattggatagagtcaggacccatcagtgtgctgtattcaggaaacccatctcacgtgcagagacacacacaggctcaaaataaagggatggaggaagatctaccaagcaaatggaaaacaaaaaaaggcaggggttgcaatcctagtctctgataaaacagactttaaacgaacaaagatcaaaagagacaaagaaggccattacataatggtaaagggatcaattcaacaagaagagctaactatcctaaatatatatacacccaatacaggagtacccagattcataaagcaagtccttagtgacctacaaagagacttagattcccacacaataataatgggagactttaacaccccactgtcaacactagacagatcaacgagacagaaagttaacaaggatatccaggaattgaactcagctctgcaccaagcggacctaatagacatctacagaattctccaccccaaatcaacagactatacattcttttcagcaccacaccacacctactccaaaattgaccacatagttggaagtaaagcactcctcagcaaatgtaaaagaacagaagttataacaaactgtctctcagaccacagtgaatcgaactagaactcaggattaagaaactcactcaaaaccactcaactacatggaaactgaacaacctgctcttgaatgactactgggtacataacaaaatgaaggcagaaataaagatgttctttgaaaccaacgagaacaaggacacaacataccagaatctctgggacacgttcaaagcagtgtgtagagggaaatttatagcactaaatgcccacaagagaaagcaggaaagatctaaaattgacaccctaacatcacaattaaaagaactagagaagcaagagcaaacagattcaaaagctagcagaaggcaagaaataactaagatcagagcagaactgaaggaaatagagacacaaaaaacccttcaaaaaaaaatcaatgaatccaggagctggttttttgaaaagatcaacaaaattgatagaccactagcaagactaataaagaagaaaacagggaagaatcaaatagacgcaataaaaaatgatacaggggatatcaccaccgatcccacagaaatacaaactaccatcagagaatactataaatgcctctacgcaaaaaaaaactagaaaatctagaagaaatggataaatccctaggcacatacaccctcccaagactaaactaagaagaagttgaatctctgaatagaccaataacaagctttgaaattgaggcaataattaatagcttaccaaccaaaaaaagtccaggaccagatggattcacagccgaattctaccagaggtacaaggaggagcttgtaccattccttctgaaactattccaatcaacagaaaaagaaggaatcctccctaactcattttatgaggccagcatcatcctgataccaaagcctggcagagacacaacaaaaaaagagaattttagaccaatatccttgatgaacattgatgcaaaaatcctcaataaaatactggctaaccgaatccagcagcacatcaaaaagcttatccagcatgatcaagtgggcttcatccctgggatgcaaggctggttcaacgtacgaaaatcaataaacgtaatccagcatataaacagaaccaaagacaaaaaccacatgattatctcaacagatgcagaaaaggcctttgacaaaattcaacaacacttcatgctaaaaactctcaataaattaggtattgatgggacatatctcaaaataataagagcaatctatgacaaacccacagccaatatcacagtgaatggacaaaaactggaagcattccctttgaaaactggcacaagacagggatgccctctctcaccactcctattcaacatagtgttggaagttctcgccagggcaatcaggcaggagaaggaaataaagggcattcaattaggaaaagaggaagtcaaattgtccctgtttgcagatgacatgattgtttatctagaaaaccccatcgtctcagcccaaaatctccttaagctgataagcaacttcagcaaagtctcaggatacaaaatcaatgtgcaaaaatcacaagcattcttatacaccaataacagacaaacagagagccaaatcacgagtgaactcccattcacaattgcttcaaagagaataaaatacctaggaatccaacttacaaaggatgtgaaggacctcttcaaggagaactacaaaccactgctcaatgaaataaaagaggatacaaacaaatggaggaacattccatgctcatggataggaagaatcaatatcgtgaaaatggccatactgcccaaggtaatttatagattcaatgccatccccatcaagccaccaatgactttcttcacagaattggaaaaaactactttaaagttcatatggaaccaaaaaagaacccacattgccaagtcaatcctaaccaaaaagaacaaagctagaggcatcacgctacctgacttcaaactatactacaaggctacagtaatcaaaacagcatggtactggtaccaaaacagagatatagaccaatggaacagaccagagccctcagaaataatgccgcatacctacaactatctgatctttgacaaacctgacaaaaacaagcaatggggaaaggattccctatttaataaatggtgctggaacaactggctagccatatgtagaaagctgaaactggatcccttccttacaccttatataaaaattaattcaagatggattaaagacttacatattagacctaaaccataaaaaccctagaagaaaacctaggcaataccactcaggacataggcatgggcaaggacttcatgtctaaaacaccaaaaccaatggcaacaaaagccaaaattgacatatgggatctaattaaactaaagagcttctgcacagcgaaagaaactaccatcacagtgaacgggcaacctacagaatgggagaaaatttttgcaaccgactcatctgacaaagggctaatatccagaatctacaatgaactcaaacaaatttacaagaaaaaaacaaacaatcccatcaaaaagtgggcaaaggatatgaacagacacttctcagaagaagacatttatgcagccaaaagacacatgaaaaaatgctcatcatcactggccatcagagaaatgcaaatcaaaaccacaatgagataccatctcacaccagttagaatggcgatcattaaaaagtcaggaaacaacaggtgctggagaggatgtggagaaataggaacacttttacactgttggtgggactgtaaactagttcaaccattgtggaagtcagtgtggcaattcctcagggatctagaactagaaataccatttgacccagccattccattactgggtatatacccaaaggattataaatcatgctgctataaagacacatgcacacgtatgtttattgcggcactattcacaatagcaaagacttggaaccaacccaaatgtccaacaatgatagactggattaagaaaatgtggcacatatacaccatagaatactatgcagccataaaaaatgatgagttcatgtcccttgtagggacatggatgaagctggaaaccatcattctcagcaaactatcacaaggacaaaaaaccaaacaccaccatgttctcactcataggtgggaaatgaacaacaagaacacatggacacaggaaggggaacatcacacaccagggactgttgtgggatgcggggagcggggagggatagcattaggagatatatctaatgctaaatgatgagttaatgggtgcagcacaccaacatggcacatgtgtacatatgtaacaaacctgcacgttgtgcatatgtaccctaaaacttaaagtataataataacattaaaaaagaaaaaaaaaaagaatgatataacggggtccggcatgctggctcatgcctgtactcccagcactttgggaggccaaggcaggcagaccacctgaggtcaggagttcaagaccagcctggccaacatggtgaaaccctggctttactaataataccaaaacaatttagccaagcatggtggtgggcgcctgtaatcccagctggtggaaggctgaggcaggagaatcacttgaactcaggaggtggaggaggttgcagtgagccaagaccacaccattgcactccagcctaggcaacagagtgagactccatctcaaaaaaaaaaaaaaaaaaaaaaaaaaaagaatgatataatggactctgggtactcaaggggaagagtagaaggggagggggatgagggataaaagactacacactaggtacagtgtacactgcttgggtgatgagtgtaccaagatctcagaaaacaccactaaaggccaagtgcagtggctcatgcctataatcccagcactttgggaggctgaggcaagtggatcaattaaggtcaggagttcaagaccagcctggccaacaggatgaaaccccgtctctactaaaaagataaaagttggctgggtatggcggctcatgcctgtaatcccagcactttgggaggccaaggcgggtgaatcacctgaggtcaggagttcaagaccagcctggtcaatatagtgaaaccccatctctactaaaaatacaaaaattaggcgggtgtggtgacgcatgcctgtaatcccagctactcaggaggctgaggcaggagaatcgcttgaacctggaaggtggaggctgcagtgaggtgagatcacaccactgcactccagcctgggtgacagagcgagactctgtctcgggaaaaaaaaaattagctgtgcatggtgctacatgcctgtaatcccagctacttgggaggctgaggcataagaatcacttgaaccagggaggtggaggttgcagtgagctgagatcgcgccactgcactccagcctgggcgaaagagcgagactccatctcacagtaaataaataactaaaaataaaaagagaaataagtaaaaataacaaccaaacgacaaaacagtgcagtttattcaaagagacagagactcttagaactgagaaaagggccctgttgggctctagagacccacaccctgctctcggggtcaccgtcccctacccagaggctactgagacagtccaagcaaagaacaggtggctctatgcacctgggacacccgtgcccaggcagcctgcttacatgtggggaaactgagtctcagaggggctaaggtattgccgaggtccacttgcccggtttccagggcccatgcccccatgccctgccctgctcatctcccaatctccaagcagggcttggcacccgcagctgaacaggcctggtgtacacatggttgtcaggttccttggaggccgagggcagccagagacagaggccaacaatgagcagcaccaggaccacggccagcagacccagcaccactaacttcatcttcatgactctactgcatccacggggcaaggagcagggtcagacccagcctcagacactccctggcacctccccaacagagcacagtctaaagtcgggcctcagaaacacaagttcagtgtctccttctcgcctcccagaacgtgtgcatgctgtccagtcctgggagtgggcgcctccaaggaggagcagaggcagggaaggagcaggagctgccagagaacccataagcttacctagtcccagaggggacaagaggccagccagggggtgcccagcagccctgggggacagtgcaaggcatctacacagggtgcaggacaggcaggcctctcacagaggtccagcctagcaaggaggatggggaggctgacgtcacagcagcaaggaggcacacagtgactccgcacagtaactcagcctgtcaccaggtgactaaacttcatgcagccctgggagggccccgggtgggaggtgttgtgagccggggaatagggttcccacttcccaggctcagttccttccaaagggtgctgtctgcccacgagcccctccagtgagccccaggctgggtctctctctggctctccctgtccctgttcagaacatctgaactcacagccagtgtcccagagatggctctggaggcggtggagtagtggtgcccctggcactagaccagaacccagcctaaggggcctcaccacacgctgctgtcaatgctaaaggtgtgttccgggaacatggcctggggccctgagtgcagactggttctgctgcccatccagaaacattagcaccccaggcccaaggaaccacccgaacagcccagaaaggcagggcccagagagggcctgagctggcccaagctcacacagcccagcagtgcaggcttggccacttggtaactgccccaagttactgcatgtttctgaccagcccaccaagaagtctgagccaggaacagctgcggacccagcccaggggactttggacagtgctgcccattcccctgtggccctcatctgccaaggatatgggccagagtctccctgagtcatggctccctcccctgctcctgggcctgctgtgtctacggtgccggagagcccctgcagcctccacctgaggtctattccgtgcccataacacctaccccacaatcatccttccaggctgccccagctgacagaaggggacatgaaggctgacccaatattgctgcctgcctgggtcacatagacctgtcctgtcatccactgctctcaaatgggctctggacagaacccaccagacacacaactgtgagatcctcaatagccctagggtggaggtgctatgaccaagcccttaccctggctattcctccccctgaagatcagggtgactgggaagatgacagggcaggaaccaaggccccatgacctgtccctgaaggctagacagccaacaggaacatcaggggatttggccctcctaagtggctgcattccatggcagtcagccatgaggggtctaaagtggagagccacagggctctgtcccctgccccggcctgctcagcagtttcctctctgcctgagagcatataagacaggcaggattcacagcagcaggtgggcaggaagaaagtctgagtgcgcaaaggatggctcagacccccgcagctgaccccaaaaagaaaaccctgggctggggaaagtagggagacagagctgcctttgatggggcacagccgaagcctggcagcagctgaggattccagagaggggagacaggaggggaggcactttatcaaaggacatgttaatagaggtagggcctacagaacgaaggaggcttctcctcgcatgctgagtgtgtcacattctgtcccagtcagccctctaccccctgaatgcagagagggcacctagggggaagtgggtctggggaagccatgtcacccaaggaaagactgcaggggctggcctagaagtcttctgcagaccccacagctcttgtcctgggcacataaggtagtgagttccctgtccccagaaatgtgccagcctcactcacccagagacacagactctggtgtcagtatcacccacttccaacacacgtgcaagcacgtgcgcacacacacaactgagcctaatctaggctgagcagagcagcttcccaggatgcagcagagagaggagtatgaggaagagatagacatggcagccagtctgaagtttcctggttaatccttcaacccagcttgatggctttgtcaccacaaccccagagccacaagggtgaaaccagagcacagccccaaccccattcacaggcaggaaactgaagcttagacaaaagggatttaccgaggtcagctggccccaggaggtctgcagacctgtaggtaagcccaggacccacccatcccttaccctgccagcccccagcctggagtcactatccctgggtacgagaacgcacagatctctgtggcttctccaggcctgtctacatccctggactggacgcttactacccagacctggagttggaatccatcttccacgctgtctacccatgcggtgcagtgttgagaattagaaaaaacaccccttcagtaagatttaataaccactacctgctggaaacctgttgaaagaactatatatatatccccatatatatagctgagaggtggcaggcaccccctggagttgggcaatgaccccttgcacaaatggccctgccccaccccaatccacagccacaaacagaacccaggagtgaggcaagcatggcccaaggacacagggtcccccaaccccatcacagctctggctctactccagagctgaccccccgcccccattcagggctgccagatcctcctgggtctgtttcttcatgctgcactctcccctccttttttttttttgagacagagtctcactctgttgcccaggctggagtgtagtgacacgatctcggctcactgcaacatctacctcccgggttcaggtgattctcccacctcagcctcccgagtagctcagattacaggcacgcaccaccacgcccagctaatttttctatttttagtagagaggaggtttcaccatgttggccaggatggtctcgatctcttgacctcgtgatccgcccgccttggcctctcaaagtgctgggattacacgcatgaccactgcgtctggcccactcttccctctcaattccaagaagccacggctctctcaagggcttcttcgaataagtcaggtgactctgccccagccctccctcacccaccggcatacctctctcaaacccacttagccaagaaacagaggcgccccctagcccagacgcagttggatagagaacccagggctctccccttctgtgggatccctctgcaggatgtgcccacgtgagtttcccccttcaccccgaagtgcaactcactcccactgcacaggtgcataaaccgaggctcggagaggaagaggaactcctctagagcacagcaagcatacggcagagctgagaatggaactcaggcctccagacactcctgggagtcccctggcctgagcttccccacttatgatgtccagcatctcagagagagtgagtggctcctccgggtcacacagcgctgggccacagccagctgccctcactcactggctcaccagactctggatctggtcgtccagcagcacactaaaaccaagctaagattccccgctgtgacccagctcctctcctccccgcctccccaggcagcatgggggcgggcagtgcggtgcgggggaggcattaaaggcacaagaactgctgcaggtgggacaatggctggctgctggtcccatccctggggctgtgtgatctgggaccgctgcaggtctgagtccggtggggtctcaaaccctgaatgagagacctgaactctgaaagcctcggtggggctgaatgaggctgggtttcagtgggaggcagattagaccaaaggttccctgggagatggggccacagagctgggctgcagccagatgcccacgccaggaggggctggagatgtaagcatctgaggccccacaaggtctgaggagcctagatcacctctacaaccccagggcaggggatgcctctcctaacaggccctctccccagcttgcagggctacaggtggggctctaggagctgtcactccaaggaccctggtcacctggactgaagggagtcacatgatccaggagggtccttcctcaacccccaatttcaagggtctgagcagacaggctgacagaggaccccagacagtgggagcagggggatgaggcccatccatccatcacgccctcacctgctctgccccattcaatgagatggggtgggtgcccccacagcactggcaggcccaagcctctcagccctcagatcgaggtccacacatggtctgcagcctgccagtattgtcactcttagcaaggtgcatacttaccttccttctttcattccatcattcattctctcatcaaatcctggcccctccagattcttctctcaaggagccctgacctggctgggcatgagacagtatggtcaccccagggggaagagccctacggaaggggcagacaccagaatagggcccttgggaatccagccggaggtgggattggatttggggaggacctgacaggcagaaggaaccacctgagcctgaaggccaggaaatggagccttttccaggaagtgagggctgcaggggacctcttgaccaccctaggcccgtcctgagccccgaggtgtcaaagctggaaaaggaggtggccgagctaagaccttcaaggccaggccagtctggactttgagagccctgggaggctggtcaatgtgtcaccgggcccagtaaaccattaaccctggctcactcattaagaccctggtgggtgtccattagctccttggccggtttcaggagccgggcagagggtaggggtcatgggaagaagggagtgctgattggggtgctaggtagaggctggctgagctggctctctgtgtccttattccttgaggagcgttccagggccaagctggcctccagccaggggcagctgcaaacacagcccggcgggggtgccgccccaccatcctagtgactttcatcttcttatcactcctgtgtactggcaccagcagcccacagtgcctcgggggcctcagcctgacaggaggctcaaggggccagtccagtgcctggctcagcacccagccacactgcccctctgagaaatgggcccaatgtggcctccaaagccttgtctgtttcaacgggctgggatctgccccacctctgtatctgggaaaacaaggccctggtggggcaagaagggagctcctggcataggaacctgcaggctgagaggggaagggacctgcccaaagccactcggcaagacagtgacccatgacaccaggaaggctgtgcaaaccacttcctgcaactggcgtctcattgcagccccaccccactgtcaggtccaggaagctgaccacaggaatcacccggaaatcctcgtgccctgagtgggccatgggggcatgacatcctgaactgcagtcatgaggctcacaatgagcgagcaatgcggatgggtccagatgcaagctgtgcctggcccatactccagaaccgctggaacaacatctcagggacccctgggagccagaaacccaatattatctaggacattttgtgtctcctggtgtcctgcaccaaggagacacttggtaaactggctaaatagaactgacttcaaatccaagcatcatagcattggagtcaatattaggatcacggaatctcaagtgtttgccctctgatcttccagcatcccagaaaggtcagcttacataccttccccaatggggagctcactacctccaaagatagtgggactgtgtttggttggcgagttcttcccaacattaagtgccaatttgcctctttgtaacacctgctgcaggtgggcctggcctcagatcctgcccactgtcaaaggccacagagcagagaaacaggggccaccccagatcctgtacctggccacaaattctctgagccacaaagaccacactgaaggaatgggaggaagacttcagctcaatggaagggctggtgccactcagcttgacggagggaggtcagcacaggccaactgtgggcatgggcagagctcctgtgcccccagagcctggccaacacccccagtgccatttgtagcatttgttattccagcacccacctgtgatgtgaggacacagactgaagcatggccaagtgcgtgggcccttcagaattgtcagcttgtgaatgcctgggagcacccagcagcagggctggcctggcacttgatggaacaagtccaactcccaaactcagaggcaggatggcagaggcatgggccctagagtccctgggttcaaactcaaccccagccactgatagtgtgggtatcacagcagcctttcccttcctggcctcagtctcctacctagagagcagggataactagaacagttactaggtggattccctgagacggccacgcacagactgtagggagcatctgctactttcaagacctcacagggtctcgccaggctctgacaccaggcctgtaggagcttctcacctttcctgatgagcagctcagagcaggggcccaaagggtacccctcctggccgccctgtcctccctgaccaggcaccctccacaggtagtatttatcacatcacctggtaattatctgcagtgtctgaaagctccaaggaggggttgggggtgcaggaagactgtccatgcctcagccccgacactatcccacgtcctggtctccaggaaagccaacccgaacccgctcatgtctcaaggcctccctggtgacatgcccaagcacacctgttcacacacagccccgtgacttcactgatgccaaaactgcgcagcactttccacgcacgccatgctctcatctggacttttggggacctccccctgcctcatagcagcaccttcccgacctcccttgcttcttggatactgggctcaggaatgttctcactgacgagtctgcgccctgctggcttatgtttcagacacaccagatggacgtgcccaagcctgagctaagcagctgcctccccagacctcctaccaccagggcagccagagtctagccctgggcagctgcccctgcatcctcactgggcctgtccagctgctcccacctctataccccactcccagcctcacctgatccccagtccccacaggccacccctctcacctggagactcccaatcacaggtcccagcccctctgctgtttccctactgcagccctggcaatcggcatgcaaatctgagcacacccctcccccactggaaaaaaaacactccagaggtcccccttgtcctaccttgctggcacccgtcctttcctcctttttttttttggagtggggcagctggatatgaaccgtcctttccccttgctccttcccggtctttgggactttgcactgactccattatcatggagacactcttcagacaccaatcacaatgccacctcctcctgaagccctccggcactgcatctcactctgcaggccggctgcgactgctgccccctccacagtatccacagtgcacaacaatcttcactgaatggatggatgccagctgtcaggtggctagctgtttttactaaaatgcatcttctaggactttacactgaatctacctagccacctgacagctggcatctctaatcttgtaatcccagcactaagggaggacgaggtgggtggatcacttgagaccaggagtttaagaccagcctgggcaacatagtaagaccctgtctttaattttttaattatatatatttttttacaagaccaaagaggacaaggtttggggagcttcatgtggaggccgacaggaaggtgaataagaactcatccaaggccaggcgcagtggctcatgcctataatcccagcacttccagagggcgaggtgggtgaatggcttgaacccaggagttcaccaccggcctgggcaatatagagagaccccatctctacaaaaaaaaaaaaaaaaattagctgggtatggtggcatatgcctgtggtcccagctacttgggaggctgagggggacgatcacttgagcatgggaggcagaggctgcagtgagctgagatagtgccactgtactccagcctgggcaacaacaaaaaaacccaactcatccatgtgtccaactccattaggacagaaacttctgtacttgggagtcttccagtctttgccttatattatctcttcatctgactgtttatttgtagcctttatttattttatctttttttttgtgatccgcccgcctcggcttcccaaagtgctgggattacaggcgtgagccaccatataccacgttctcacttcaagtgggagccaagcactgggtacacatggacatcaagatggaacaatagacactggggacaaccgcaggggctgagagggagaggggcaagcgctgaaaacctacatattgggtcctatctgggtgctggggatcattcataccccaaaccttagcactgcacaatatacccacataacaaacctgcacatgtaccccttgaatctaaagtgaaagttttttttaaatctcatgggattctttggaggaattaaaagaggttgagtccatccatgccccattcaaaatccaggagtggcttacaaatgctctggttttagagcttcaatatgagttttgtgatacaacacaaacaggcagaagggaactgtattcaatatacttgaaacgaaccattgcatataaaataaaacgataccatttgtggccaggcacggtggctcacatctgtaatctcagcagcactttgggaggctgaggagtccggcggatcatttgaggtcgggagtttacattcccaccaacagtgtttgagggctcccctttccccacgtcctcaccagtgttcattattgcctgtctttttgacaaaggcctattttaactggggtgagatctcattgtggttttgatttgtgtttctctgatgattagtgacactgacacaccactgtgccctcggctggccttagttcacttatacatctaacattcacacgactaaaatagtccccatgaagccaatagtgccattggtatcacgtagaaggatacaagacacgaaacaccgtgtgccagcagatgtatcctgcctgtgtctttagcaggaatcctcacggctgtccacacttcaggccaggagctattctctggatcctgctccccaagtgacacctcacgtgcaaagcagcaaggtcacatgggtgggcacagggctaccaagcttagaagcctgtgtcccaaaaagacactgagatttcttttaacagtcccatggtcaaagttttcaagggtcccagcaacggacatgcctagttacaaacaccactgcgctcagggaaacccaaagtatggtttacctcttgattttttctccaaagccagccacgaaaaagttgaccacagacttcaaaacatttctaacaatagcaaagtccaattgatggcagacttcaaaaattgcaaatactcttctctaactcgagatgcccccattgttttacaattcattcacagctctcccaattcagataatgatgaccaactctgggccatttttatttgtagtctggtaacccaacacagatgacattccaccttttccaggtttccaagggaactgactcagaaagttaacccaagttcatattcatttctagagaaagataaaaaaagttttctaactttattcatgcatacgcaatacaaggatccgtggaatttctgagagaccttcaacctcactgccaaattttcaagagctgtgacaaaccttaatgtcaaagaaagactgctttcatagcagcagaactgccatcacatctctcagctggatctgccacgggcttttttttatgacgtatcaactgcttccccatgtctctgagttgttgaaagtatcacagcggcaaacacatttttctttctcacttttttttttgctgttgagatggagtctcaatcggattatcccccaggctgaagagcagtggcgcaatcttggcccactgcaacctccgcctcctgagttcaagcgattctcctgcatcagcctccagagtagctgggactagaggcacatgccagcacgcctggctaatttttgtatttttagtagagacagggtttcaccatgttggccaggctggtctcaaactcctgacctcaggtgatccacccgccttggcctcccaaagtgctgtgatcacaggcgtgagccaccatgcccagcaggcaaacacatttctagttcatgcatacatatgccaggtgggatgaacctgccccggggcccctgatggtgctcatgggtagagcagggtgatccccaggtcccacgatggcatgggacctgatgctggcatcaggtggtctggcctgttgttaggccccctgctggtgcaagcacatgccagaagtggaaggcagggcaggtctatacccaggtccctgggtgaagtacttgggtacttgtggggtgggggttctctgggaggggtcagcctgtccttaggccctgtgggagcctgcatggacacaggttgtggttggtgggctggggtgatccccaggcccctgaatgtcatccttggggaccaggggcaggtgggctgggtctgttggcagtcctccctatggtatgtgtctgtgcccatggcaagaggtgggcagagcaatttccaggctcccaggtggcttgcttgggtggcagtggtggtgactggttgtgagtgggttgagtctgcattcaacagtcaactcagaaaccccagacaccattttccatgccaactggcctgtccaccactcagaaaggccctggacactgtgccatgtggctggccccgcattgggccaggcttccatgggaggcaggaggtctgggccctgccctggggagggagaagaatgggacacaggcagtggtcattgagcggaagagacagaatgagcacaggatgctgtgaggcggtaagtataaggaatcatggagctgaaggtgttcatctgacatataccagaaactaacataaggtaggaaaatacacaaaaccaactaatccaacaaaacttgggcaaagaactgatagacatttctgaaaagaaggcaggaaatgaacaggtaaaaaaaaaaagcttgcccacatcactaatcatcacaaaaatttaaatcaaatcacactaagacagcgtccccatccacataaaatgaatgttgccaaaagcaaaaacagaatttttaaaacgcaatcacaagtgtaaatttacagagagggaaactcttagacactactggtgggaatgtaaatgggcgtacacactatgagcaatagttggcagttcctcctcaaactaaaaatacaattactatgtcatctagcaatctcatcactgggaaatacaaagtacatggatgtattatgctccctgattacaaatgacatagaagagctatagtggtccaaacaatacggtattgacattaacacaaaaatacagaacaagacacaacgagggaaccaaataccaaacccaaattcatatatgatggacacatttttaacaaatatacccaggggatgggagaccccgggctgccttcggttggggctgcagaagtgtcctggggggacctgcagccacctctcacctgggctctggatggtttctactccatgaggatttccagagtttcccctcagccaccctcagagtcaggggggcttccatggggctgcaaccatctgtcccagtctttcctgtctctatgacacaccgtgtgacctgtgtacactgcgagatgtaggtgcgtgcattgaaaccgtacagttaagatgacctacaactgatgctactctaagtcttccagagatttttcagatatccccagagtaaaccaaactagtgatatcccatggttttgcaaaccagaaccaacaactgcacagaaacagctccttatgcgccatcagacactctccagacctgcccctcactcacaaatgtaacaaagcagcatgaacccaggcagtcttcactcctcagggccacataacaacctctatcggtcaggaagcctttgatctgggccaggctgccgacccacaggggttaattgtgcctctcatgctgagtgttgtttctcctcactggactaacccccacccttccaccaagaagggcccccagggaaactgctgtttgacatccaggagcccatgtggaatgttccagcaacctggatggccttggccacctctaataccagcctttccctctgtggggctcccttcctggctcttgctcatgcaagtcaatctaaagtggctgagatgtcctgctccctcaccctcctgggtcaccctgatggcataggcaggtgtctgcattcaagaacgagttacccacaggccaacttccctggtgtgggggacaatgcctggggcctccaaacagccagccccaggtaaacaatccagctctgacacagctcaaagactgtgtggcgtacctggagagactctctggtcctgtgccctcttctggctcactggattcttaggattattgagagactgggcttaaagctctcagcctagggcccacaatgccacagggaatcaaatcagcatgaccagggatcgaagacctctccttggctgggaatggggaatcagggttgcagagacaaggggcacagagagatgcctgtgccatcagagaagggactggggatctggtccactctgggctcctcaacctgagcgtgaggccttgctgtgccatgagctcacctgccccttgggagtccactgtgactgcagtccagtggggtcaatgtccacactgatgccggaaagaagtcctgggagatgcggagggcatcctgtagcggcaggcagtctgggtggtccacgggtgtgagcttcagcaggtcctgggaagggatgaggtggtgaattgggggccgtgtttttggggttcgatgagaagctcctgggggaatgctcagtcctcaccaaaagaattcaaagggcaggtactcagggacccacactcgtgcctgcaaaatctgaactgaaaattagaatcggagcagcagggttgattctaaaaggggctgggctcgcttttctccctgctgcagtcattactcgtttcccctggcagaggcagccgggtggaggctcatctcttcaagcagctgggagagacaccccactacccaccctgcagctgctccaaggatactggagacaaaaagacaggggctggggaagcaagatgttcctgcctcgaccaagacagcaattggccaaatgccctgaccctgctggcatggttaccgcaggccaggcaggcatattcagggctcaggatccctctgcctgacttttcaaatgggctgttctcagtgactctggccccctcccaccctgggctcactcttgagaaactcctaagccttctctggcccttcaggggccttaacgcttatgtgtaggaccaggatgctctgagtgacctacttggtcaatgggctgctacagcagagctgttggggaaggcagagagaaaaaggacaatgacagacaaagaaccactcaacacctcagagaccagctttgtcccccacccaaccgccttgctccccacatgaacacctgcttgcaggaagccaaagtgggtccacagcagcccacctctgttctcactcccagggcagacaaagcagcaagaacaggtgacacacagccccggtgaccctgtcccctccctacccgtgcctactctcccatcaaacctggcttcgagggctgcccgccagtcctgtccaggccttatctggctcagagcagatgatcccctgcacctcccaccctgaatcacacagctacacccagcacatgctacagaggcccagcacactctggatcacatccagaaactccacaataggggaggagacatgctgtttcccaggaagggcagctccccagacttggtcattctcagactcctccagtcaaaggccgggcacagccagctgggatcgccatgcttcactctgacccacacgactggccttgcctcctctatgggaagagacccctcagcacaacctcaaaccgagacataacaggacaggacaggctggatgctagagaggccagccagatctccacacaaaggctctgctcttaagcaggaggtagcctgagggtcaaaggtttcctgaagcaactcaggtgagacctcacatacaagagccccaaagaggctgcaaaagcaccagctcagccagccaagaacccaggtgtcacacccttctcagaccactgaggatcgctgggattcagcaggaaaaggtggacatgacagctgatggaccaatacttcccaacacccttccagcaagcagctgtgccccgcccctccccacatgagtcactcaacttcagtcctgcacatggatgcctttgaccatggggtcatggctttggtctcctgccataggggcagtgagaggaacaatggtggtctgggaaggaggatcctagactgggtgtcccacaagaccaggctgtgacagatcccagagccaatactcatgcgccagccagtccccaaacccaacagctacccaaagcccaggatataaatagcctgtgcactgctaagcagatacttcagggaatgatctgctggctgtgaagaagatgcggcctcagtagggttccacgagccttctgccagcaaaatcttctttgcttggatgcccattagaaacactaagggagctcttcaaaggaacaggccagacatggtggctcacatctgtcaactcagcattgtgggaggctgaggcaggaggacagcttgaggctaggacttttaagaccagcctgggtggaacagtgagaccccacctctacaaaaaacacaaaaattagcatggcatggtggtgcatgcccatagtcccagctacttgagaggcagagaagggaggattccttgagcctgggagatcaagggtgcagtgcccatgatcatgccactgcactatggcctgggcaacactgcaaagtcccgctttcaaaaaagaaacaaacaaaacaaaacaaaaccaaagatgcctgtctcctgccccatcaaataaatccaaatctctgcagggtgacacagggtattaacattcttaaattttgcctttgctgaagtaaacatatagtaatggctgaaaaccactgcgttatgtaaatacacttcctatgacttatttgtagtccttttgtatctagcaatttctacagaccctctctgtgggcttcggaagccagaatgggcagggccaggtgtgaggtgtcctaggacactgagggtagagcacagctcccagctcagggggacccatttctgaggctaaggcacccacctggggctcagcctatcttcagagggaaaatcacacctcagaacaccagacacccaaaagaaagctccagttcggcagatacctgccaatagaccctggagtggctgccccagggaaaactgccattgcactgtcagctccctccagccctctctcaggtcccagcaggagcagatttctgactaagctcagaggtctcaacaaatggcaggttgaacatcagaggagttattaataggcctatagttacctcaagactccaccttaccagggccaaaaatgagtcctgggagggcagccagaaagaaagtagggcagagaggaaacacagggagaggggccctgggaccacgtcagatatggagggaaccaggggaacgagagcagccctgatgattgtactccccacagcccctgcatgcctgtgaaccctgagaattcagggtgaggagctcactcttgcctttcacctgttcctgggctctggcaggctggcctgcttcctgccccagcctcacccactctccgcactcctcgccactgatgtgggcagctgatctctccggtttgctgggctctcaccctctgcccaatggcaccaagttaacttcttcgcatgctttattttctgtgattaaaaagggaaacaattctcactaacgccatttctcagaggagaaaacaggcacagggatgttctatgacttcctcacgatcaccaagctacaagggggagctgggctttgaatggaggtctacccatgctcctaaagttgaggcgtcctccaaggaaaggacagcacctataaaagctcaatgaatggggcggcagtgtcaccactaagcccgaccacgctgctactctgatatccaacttccagcctccagaacagggagaaatacagttctgtttttgatgagctccccaggccgttacagctctttctttgctgtaacagcctgaactagcccagaagtgctattccatcatctgtgtcatattccatcattcagaagggagtcactaacccctcagtgctgtctctgtggacgctgcccaccctaggctgagatgaggcacagggtctgggtctaaataaaatgggaaggcactggaaggtgcaatgtcataggaggaggatgtctgaatttcatttaatctcaacctctactggtgcagcatgaaagatgaggcccagagcaaaagtgtcttttcccgagatcacactgtggaccccaggcccactggagttgcattagacgttacctctcaccccttcttgtatttgttccatttctaagtgtgtgcaatatccacagggaacaccacaccatgagtttttaaatatttatctcaaacataacctcatgagttccctaggaaagagatgctagcataacccccattgtgcatgctggggagaccccaaaacaccaaaggagttctctagggtctcacaactgctaaaataaaggctgtttgacccagcactgtctcctcaaacctgggaccctggttatatccaggtcttcccaaggtgctgaaggggcacactttttcataatggtgactacgtaaggagttgacgggggagggtgagcggtcagaagcccagaggggcctttgagtaggacttatggaaaggaggagcttacaggatggaacctacaagatgtgacctcacttccttgccgacagacccccaacagaacttacaattctggtaactaggcacccacattctagagacagccccatttccagctcacttcgtaggcgatgctcgagagaacaacatgttctcctgctgtatcccgacatgctgccgacctcctcgtcgcacaagaggccaaaatgagagtctttcccgagaatatagacattggttcaaccctcaccctcgacgcctctggccctttgccagaaggcacccacaggtaacacagggcccagggcaggcccatccaggctaggcctcagctgtgcccatcagggcagcctcaggcccctccccacttgtttgggggaaacaggagatgaggggccctccctggataggagcaggtaggttgtcaggtgtttggagcctggtaggtatgtcaggttcacagcccaggcagtgcctggcaggatgggaaggtgagtgtcaaggacacagtttgtctgctcagatctgaatcccaagtcctcaagctgtcatctgccggagacctcaggcttctctggctggaggtctatgcagatgctcctatgtgccaaatcctgttggggaagggggtgccagggatgagttctaatgggggtgtcccactgtggggtcagccagacaggccactgacacctcttggcccggctctcgggcactctctttgcagagctccacacaacagaccaaacaagagctgttggatggattcaatttctccatattcttcaaagggcacgtgcaccacaccaccaaccacgtccagtgccggtctgcggtgagattgggcacagaagggtctccacagacaggacttgtgaaaaccaaggtgggcccaggactcagacacgaatatggggactccctaagctccatcctagggcgttcccacttgagtgacccactgtcctctcccaaaggaatctggctgccattagtccccagtggcaacttggttacaggcaaagtccctttcacctatcagaggaagaccagagaaaatccttctgttttcactttaggctatgccaggagtatctcggcatgttgctttaagaattgagtacaatggtaacattgcagcaaaatactcacactgttatcattttaactccccaccctaagtggatctccggcaacaggcaggcagctccgctgccctgccagacctcctccaggacttaaaatccaacacttttgcacaaacaaggggtgggggtggggggggtgcattgattacaacaaaagaaggtgaagcgactctatgcattagtctttaaagtgtcatctcacagaactcatccctgcagccccatcaggcaggagttgtaccctcgcatgtcattgtaacattccttaagggaggccattttccacagcgggtcagcctctcagtgctggtggagcctgtcatgataaaattccctttcgaggcagcctttctacaaggagcataatcctatgcgtgtcctaataggctggagcagtttgccagggctgccataacacggcaccctgactgaagggcttaaccacagaaatctggttcctcacaattctggagactggaagtccaacgtcaaactgtcagcctggggtggtttctctgggcctctctccttgccttggagatggcggacttctatctcagtcagcacagggtcttctcttgaacttctctgtgcgctgaccccctctccttgtaagaaccccaggcatgttaaattaggggccaccctaatgaactcacttcacctgaattacctcttggagtactctgtgtccagacacagtcacattctgagtctctggggttgagaatagaaacagttacatttggggaaggggacacaattcaacccataaaataaacaaatcccctgcagcagacagacacccaggaaagggatatctgggtgaaaggatatgcagatatcaactttcaacagctctagctagttgactttccaaaagggctccagctggtcacacggtcaccagcagcctctgaaggtagctgcttctctgaacgcagcctcccctgaatactaacacgcttttaacttttcgccaacctgctgtctgtgtggcagagaaaatccttgtttcatttccactttcaaacatacatttgcgtaacctttcacgggttcaatacctgcctgcgttttccccaagtcgcctcgcagatcctgggccttgggacgcgcttcctcccaccctggagtcttccggcattttccccttggccagggctgggatggccgtagctgtttctccagactcacgttcatgttaaaggaacaaaaacaatcatatacctttaagtcaaagagttcttctagagcgtattgtcctgtgtgctgttgctgaaatgaggaggggatgaggcctccccaggccttgaggacttgcagggatgatgctcttcatgcaggttgctgacacagagggtgctgttgccccacagctgacaaacaccgggacgatgccttgaaggcaggaatcgttttatcattctccatcctcacatgcaatgttactttgaaagcctagaacgcttttcaccatgggcacccaggttctccatatgcacaagtccctgaagggttggtgcttcttggtgtgagttccagatcccgatcctctggtggtccatggtgttaccactgactcccatgtccctccttgtccccctagtatgaaaatgagatctgcaggatgctaactttccagcccggcactggggagaagctgttgggagtccctggttccagcctttctaactaaacccatctcctcctatgccacctgcctgggcccctcctgggactttatcactgtgccacactttttggaactactggttagaaggtgagtgtccatccccctccaagacacagaggtgcctctgtcccctactggctctgtcttgaagatgcacctctcggagcctcggttggctcctctggaacagggagtagtgagaagacgaacctcacagggttcttgtagggactcaatgatctaagacacagcaaacaaaggggtccctagagcctaaaactctggaaaatctgctgggggtgctgtgattcatgtttgttacttttctcttccccctcacttgaagcagctctcagcattctgcctcaatggcctgtatcactcactgtttggaaaaacacatagaaaccaagtctgcgatggcactggtaaaggatgtctgagattccttctggctggtctttctccttgacacagacagaagaggggtcccttggtgctgaaaaaggagccacaggcccactcagacatctggagaggctcactggggttctccaaaggttggggttcactcattcaacacatacattcaaaacacctcatttgtgcatcgctcttcttggggcttggcataatttcataaacaaagcagatgacaatcccccggccttgattctactcagagtcaggcactcacagtagacagaataaacaagtcatatctacagaatgttacaggtgagaccctcatggcctcctctacgtatggtggcatcctcccagattctgactagaatgacgcagcccagcaacaaatataaactgggtggatttagggttctgaagggccttttcacccacaaaacatgggggaaaatatgtggactctggctggggagagactaaaggagctctggggctcatacttcttataattcccacgagaaggctgacatctggggacttcccccacaagaggcaaatagtgagttctgtaaatggagacttaggtcccctgcaaagcagaggggaggctggggtcacagctggccactgagagacccatccccctcagcaccgtggcttcccagctctccctgtcctcctccccccgacatctgccccttccctcctaaccccaggaccaggggacccagatctggagctttgatgaggaagctgctcacaaatctgcctgcagctgcagtcttgagtgcccaggtgtacagtgctgtgctccagggcctttgggaagagaatgtctgtgggacgccagggcgcacgagggtctgtacagccctgctgtatggccaggtctgccccttccaggacagcactgatggcttacggtagggtggggctgtcctccacactggcagcaacaggccagggacccagaaccacgcaggggtgccctggagggttgtgtgggagaaggccaggcctctgactcagctgtctactccatcaccagcaccatcacctccattttgttcaactggccccccgaaaacacttcagtttactatcagcccccgcaacggtcatctttccggataaagctggccttcaggaacctctcctggcctggactgggcttggaggaccatcaggaaattgtcctaggccagttggtgcttccggagcccaacgaggccaagccagatggtgagggggcttgcagtctgcaagactttccgggggtggtgttttggggctacaattcccttaaattccacccggtcatttctgtgcttggaaaacccagtgaaaaatgactggtgtggtgaccttttctccttttccagatcctgctccacgtcctgggcaacacgcattaacaatgccggccctggagccagcaccaccactgctggcggacctggggcctgctctggagccagagtcacctgcagccctgggtccaccaggatatctacattcagcaccagggccagcaccagcaccaggggaagggccccctccagggacagtgctggagccacagtcagccccagagtcctcctgtccctgtcgtgggtctgtaaagaaccaacccagtgaggagctgcctgacatgacgaccttccctcccaggctgctggcagagcagctgaccctcatggatgcggtgagcagctgagctttgcaggctgtgtctctggcaccagctgtctcagaccagcctctccctgaggagcagccaatgccctcggtccaatttcagccccacttcttaccaaccgtgggatctggatgagtttcctcacccacaagccttccctgtctgcatgtggacggcagagatgggacatcaccagcgccagctgcacagagtgactgtgcagactgagtgacaggagatggacagaaagcagggcagggcaggtgctcactgtggggcaggcagggccatgggtcactcacccagctgctcaggagcctcactaccctcagcacttattaggtacctgatgcatactggattctatggtagacacccaaacagagcccatagttgcagctgccacaaggaaagtgcaccggtacggagaggagtagtagagggctgattgggatgggaggaagacgaggcctcaggatgggcaggcctgagccaccttctagttcttagagtgtggatggcctgggagaaaatgtcactctctcttcccacccttgttgggttctaggccatgatgcattcaggtccctcgggggcagaaaaccaaacccagggactcccacaagtctggagcccattttaaagctttctgagctccagcttggttcctgccagagaccgtggatgactgtgagctcagtccctgcctgggactgtgggtgactctgagctgcagtgtgctgtgtccgtgacactctcctcctcccccaaaggagctgttcaagaaggtggtgctccacgaatgcttgggctgcatctggggccaaggacatctgaaggggaatgagcacatggcacccacagttcgtgccaccatcgcacacttcaacaggctcaccaactgcatcaccacctcctgcctcggggaccacagcatgagggcccgggacagggccagggtggtggagcactggatcaaggtggccagggtaagctatggttgggcctggggattccctctttaaaaatggggaacttcctcttctcctccatcggctttcaggatcggcatctgtatctctggcctggaccctgcacatcccctaggctcttcttgccagagcttcactcaccttgactcccacggcccagtggtggctgctcacttccgacctggggtcttccttgggttgaactaaaatcctcctagatgagtgacatccactcggccccaggtctgccctcctgaggctccccaggcctctgcttcatccaggaggggagatctcagcagagggggctgaggctgtagtgggccaagctccaactctgaaccgcacagctcattcttccctctccaggagtgcctaagcctcaacaacttctcctcggtgcacgtcatcgtctctgctctgtgcagcaacccaataggtcagctacacaagacgtgggcaggagtgtccaggtgaggagggctctctccatggcagcatcagggttgacctagggactcacaggtctccccccatgtgccctcaatgactctgaaaggttcttggagtccagggacactggaggcagggatgggccggtggctgtggtcactaagctgccctggactcctaggcaaggatttccaactcaggactaaggttttttaaccatcaggaacagactggagccaactggaggctttcaggtgtttgtacccagcagtggaactctgtgtccagctgaaagctaactgtaaacacgcagtggctcatgtgaagtggagatggggcccaggggaggagcatgagaggtcccaccctggtcctctggagcccctgtgatcagaggactccactgaaaactctcacccagtaagctgggattcactgggttttcaaacaaaagggactggaactcacaaatctcccctgattcccaaatttacccttctttctttcctctgcccatagcaaaagcatgaaagagctaaaagaactctgcaaaaaagacactgcagtgaagagggacctactgatcaaggtacagtggagtctgggagatgcaggacaagtgtttaagggtcagagaaaagagtgagtttggaagggcattggaccaggtgtcgagtggttattttgtttggttttgacttacctactaaaagtggacttgaaaaattccctccatgcctaccttgggccaacaggaagagtggtgtgtcggtccatgggcacgtgggggcatgggggcaggaggccctggaaatgggatgtggcaatggctgctgggctgctgggctgctgagcaggggtgatgagctgcagcattagcagggctctggctcccatgctggtccatgctgctggcatggagcttcctccaggctggagggtgatcatggtaggtgggacttccttccttcctcaaaccggccagcaattcctcaggaagccaggcctctgctgctgctgctgctgctgctgctgctgctgctgctgtctgcagcacacctccatgggcagggggccttggcctgcactgggggagagggggaacaacaacagaggaagctcatgtggcagggagtccagtaactgcccagctttgggtaccaatgggcatactggggacagacgtagctgtttgctgggactccccactctgccctttgcagacacccaaaaacggtcatgtcagaggattctcaccggttagcagcgacgcatgctcatgacaagtatctgggggattcatacattgctaggggatcctccctgaccagatctcagaatcgtccatgcaaatgagaaggcaacatgtcaccccacccaggactctggaaaaccctgccattgcagtcagagatggcgcatcaggaggctacttcctcagtggagaaagagagagttccgtgcacggaactcccctgggggatcattggcgaggcgaagcctttggcatggctcaaacccagtttgcgtggcagagattccagtggggctgggataggcaggtgccacttaaccaggtctcctaaaatgccctgtccctttcccatcacgactgtatgtggctggagacctagacactcaaagactccagagaacacgaccctgatgggtggtggtgctgggatgtgagctgaaggcagccgagacggagcctccaggagcagaaggaggcgtcctctctttgggggccctggggagccactgcccgctctgggcctctgtttcctcatctggaaaatgaagggatgctgagcctgtagtgcaggcctcacagggtagaaatgaagttcaagaaaagaaagcaatttgagggtgctcgtgcctggttcttcctcagagggatgacggtgagaacaacggcaacagctacaggaaactgagccctcagaggccctgtgaggtagctgtggtttgcatcactctttacagaagaggaaacagtctcagggaggcccggctgcaagactgggtgacacacacagggagtgtggatctgggccagtggtatgagcacggtgccaggtggctcccgccactccctggggatccaagtgcggggtggctggggtgtaactgggggagaggaggagagcctcactgtccctgtcgctgacacctggcaggcggggagctttaaggtggccacccaggagaggaacccccagagagtccagatgaggctgcggaggcagaagaaggtgagtgagcctgtggcatggacgggccgcaggggatcagaggacagggctcccttccccgccagctggaggcctccatatcaagacagcgggggcttcctccccagccctgtcctcctgtggccactgggcctggaaaaccttcatttgagagaccagaggaagggtctgggaaagctggactcagactagatgtggggaagggtaaagctgggaccacaggcctttgtgacttgttaaaatcccaccatagaggttaacaaggagtgcttgctagacttggaggtcagctgggatacaggaggcagagaattgggaaaggcagctgagggtctttggctgctccaaccgggagacctgaggagggggctctgggagacaggggctgatgggatttcatgggacaggaccttgggcaggcacctgagggccaatactcatcaccactacccctcccacctccccacccctccttggcacagggtgtggtccccttcctgggggattttctgactgagttacagaggctggattcggccatcccggacgacctggatgtgagtgagcctggggcagggtgcttgggaaccaagatcctgaagcttgggaggagagggtcctggaccgagcctttagatctcagcccttggcaaacctcctctcctaagagcctcacagctgctcctgtgggtgggggtgtcaggcccatctcatcacctctgagtgatggaggctccatggcagccaccaggccctattcctgagtggtgaagctgcagagctgcctgactgcaaagctgctgaggtgtgggctgaactgggctcagcttctccctagggtagtcccgtaataggagggtgaaattgagcctctccaagggcaggcagttccaaggtcactgagcgctttctttctatgagagacctcagtttccctgtctgtcatcacagagggttggggcagaaggtccctgggcctcagctcccattccccctgctctagagcccggagcctgaggcaggtccaagtcctgtcgtgtgcacatcccctgaccctggtggccctggcagtagtgcagcatgggaaggggtggggtggggctggttgtgggccaggggcctttctgatggactctgtctgccttccagggcaacaccaacaagaggagcaaggtgagcagctggggcactcacgttggatgagggtggggatgtggacgtcacagtccaccctgggcaggacactccctggctccatcctctacatcttaggcttactgggagtgtttgacacacacaggaggaggggacctatcccaggagaaaatgggaaaagcactggaatcaaagaccaattcctgcaggaggggctgtttatatccaactctgagaacaggctgggggcgctgcatgggaccccttcagaaaactgccccagggaccagccccttctccctgcctgccaaaggcccccacagcaacttccacccaggccctgtcagcatcctgtcctctgtctctaggaggtccgagttctgcaggaaatgcagctgctccaagtggctgccatgaattacaggcttcggcctcttgagaaatttgtcacctatttcacaagaatggagcagctcagtgacaaagagaggtgagggcctagcccatgggctgagggtgggagaaggctctccattttttttttttaacatggtctggctctgtcgcccaggctgcactgcagtgtcaccatctctgttcactgcaacgtctgccttctgggctcaagtccttcctcagcctcccaagcagctgggactaccgctgtacaccaccatgtccggttgttctgctgttgttgttctggtacagatggggtttcacgatgatgtccaggatcgtctcaaactcctggcctcaagcaatccacccacctcagcctcccaaagtactgacgttacaggtgtgagccaccccacctggcctagaggaggctctcccgtggccagctgcagagagcctatggccatgcctccacggccagcatcaagccctgttgcatggggaccactggggacccaggattccagctgggcaggcactgacaggggacctgatgtgtggctcatggtggcctcacagctgcttctctgtcctgcagctacaagctgtcctgccagctggagcccgaaaacccgtaggctggcaacatcctgcagtggctgggaacccaccgggatgctggccagaacaccggctctgcaccatccctcacccagaccgtagacaccagggaaccacatctaggaggctggcagctcagctgcatcttgccctggatcctcatcaccaactgctcctgctggccaggatcaggccatgggacttttgtgagtcaggcgggagaccattttatgtttattttctttagtgtataagtaagggttttttcttaactttcgttaaaataaaattttaaaaaactattcaaaatgttctgtagttgttggaatgagaaaagtaactccagtgcggtaaccatataccagtctttaggattcatagcctagcatgtcaaattgaggctatggctgaacaagttatggaatagcattcacattacacatgccaagcatttaatgttttccttctttattcaaattattgttaactctgcttaagaaaacaaacagaacaaaacaaaaccccttaaaagccatagtatgtcacccaatctatgtcacccatagtatgtcacatttgttctactgaccagctattctcaaacttaaattctagttaaattcaagttccactgggttactcaattttcttaaggtttaaatatttaacaaatcacttaaatatttactgaagggctggagatgggaggtatttaagcaagtggtagggctggccttctccagaagtcctgggcagaagggagctggccatcagtctccacgaaatacagataaactttttccactgtggatcttcccagaccttctgacacctctcccctaaatgaacatcaaggaaggtgagaactgtttgaactcagtatctaaaagatgtcccacagcttaatttgaacacaacccccattgtgggatatcagacaaaaacatgccaaagaaatcaacatttcagggtctgaaacatgtaatacccccaaatcaacacaaaatagacacctaaatccaatcctggagccgcaaagctcctataagaaaagcgggagtttctatttcggcaaaacttgtatctatgcacgcagtttgcaaaaaagaaagaaaagaaaaccaaaaattatctatggcaagaaaccctttgaccatgcaattgatttggcaatactttttcttattttttattctttttggatggaaaacaaaaatgtgaatacaaacacataggactaaacatcattttagagcttccgcatggggaagagaaacaatgaaccattaaagaaggcatcctacagattgaaagaaagttcagcagaatcatctgtgaaaggggttgttatctaacatgtacaagaaactaacactactcttaactggaaaaatgaacaaaacctaatacccaagctaaaactgggcaaagaacctgaacaggcacatctgaagagaaaacacgaaattgactgacaggtcaaagagaagttgctcaacttcactaatcctcacacaaatgtctaactgcaaaccagactcagatacctctcactctaattagaatgaaacttaccaaaaacaacaaaaaacccatatgttcacaggcagtggccaacgtagaaacgcagaaaaagacacttttataaactattggtgggaaggtacattactagacacacgaagcgaagcagttgaaggtgccttaaacattttacattacaactacccgttcacctatcaatcccaccactggttatacacagaaagcgcatggaatctgttatgttgaagagatatcggccttcctatggtgactgaagcactactcacaatagcaaaggtatccaatccacctacctgttcatgcacagataaagggataaagaaactgcagcacgcagtggaatcctcttcggccgcagaaattcatgaaatcatgtcatctgcagcaacgtgcagaaacctggaggacatgaccttcaacaaaatgagtcaggcagagaaagacaaacagcatgatttcatgcatgtgagaatgagatcaactttctctctaaacgactttatctcctagaactagaaagttccacagtggtgaagagaggcggggggttggggagtccgggcaggaactgggaaatggatacaatgttacattcagatgacaggaataaattcagctgttctactccacagtagggtgtctagagttaacagtatcctaccatattttccaaaaaaggctgaaaagaaggattctgcatattgcaacgacagagaactaataaataataactacacaaggtaacagagacagtcaatgccttgctttcatcattacacaaggtatatatgcatgatcaaaatgtcccactctactctttaactgtatacctttactacagagcaaattggttttaaggacacagaaataaacaatgctggagttcatgtgacaccaggaaatgcccggcatttccaaagcaattctgagaaatccaaactacattggatgcatcacattctctgatttgaaatttcactcaaactctagggacctgcttccacatggatgagtggaagagaacctgaagtaaacccacacacctcatacgacctgattttggatgaaatacacaatgataagtaatggggaaagaactcccttttcaatagtcttggggtaagtggcgagccatatgcagaacagtaagtaacactaggcctctacttctcaccatgtgcaaaagttcactccgatgaatgaaagatgtaaatggaagacctcaaactacaaaaatcctacaagagaccctaggaagtacccttctcgacatcggctttgacaaagcatttatatgcctaagaccccacatgacactgcaacaaaagcagtaatcaacatgtgggacctaatacactgaagagccaccgcacaacacgacaaattaccaacagagtagacagacaacatacaggatgagagaaaatgttcccaaactatgcacctcaccaaggttctaatatctagaatctaccttaaagaccttatagaaatcaattagcaaaaccccccaaataactaataaatagacaatggatatgaacacacacttcttgaaagatgacgtacaagcaaccaacaaatctgaaaatatgctcaacctaactatcagagaaatataaatcaaaagcacaaggagatatcatctcacactggtcagaatggcgattacacagttaaaaaaaaaaaaggacactggtgtggcagcagagaaaggggacactggtccacttttggtgaaaatgcagagtagttcagacaccatggaaagcacttcggagattgctcaaagaacttaaaccagaactaccatctgacccagcaatcccaccactaggatatacacaaaggaaaatgaatccttctgaccaaaacacacatgcacacaaacggtcctggcagcactatttacgatggcaaacacgtgaaatcaacctaggtacccatcaacagtggatcagaaaaggaaaatgcagtacatatataccacaaaaagctaggcagccattacaaaaaagaaggaaatcatgtccttggcagcaccatgaaaggagctggaggccattatctaaagagaaataaggaaaaaacagaacaccaaatgacacatgttctcacttacaaggtggagctaaaattgaatacaccctaccgtaaaagtgaaaacagcagacactggtgactatcagacgaaaaagaagggacaaggtatgtgctaaagacctacccggtgggtgcacctgttccctgcgtgataaggtccctgggaccccaagtctcagtggcatgcagtataccaaaggcagtaactaatctgcctttgtaccctttagtctataataaacgtagaaattatgttaaaaaatacacttagaagctaaaaaaatgaatgaaaaacacaagcttttataattatccaaacaatcctttattggtataaactaagaaagtggacagaatgagtaaaccaaatactcaaccccaatttacatatagtgaacacattttttcaaaagaacaccaaaaagacacaatgggaaaaagagactgtttaatagatgattttgagcaaactgaatattcacatacaaaacactgaaataggacccttatgtcatgcaacacaaaaatcaatgcaaaatacattaaagacctaaaactcaattctgaaaccacaaaactcccacaagaaaacagggtgcgcatgtattttagaaaagaaatccatgcacgcagcctgctaaaggtataaacaaaacattaaaacaaaggaaacactctaagaaaacatccatagacaatgtaatggcttggcattttcactgaaaagctggggacccggttccacagagcagtggaacagattagaagacccagatataaacccgcacaactgaaaccatctgatgcttgaaaaaaatcaacaaaaataagcgatggagaaaggactccctatcagtaagtggtgctgggataagtggctagctggatgcagaagaaataacactgggcccctgtgtctcaccatgtacagaaagcaactcaaaatgaatcaaagattgaaatgcaaaatcccaggctgagcacggtggctcatgcctgaaatccaagcactctgggaggcagaagtggtcagatgatttgtggtcggggagttcgagaccaccctggccaatatggtgaaatcccgtctctactaaaaaagcaaaacttagccgggcatggtggcacgtgcctgtactcccagctacttgggagactgaggcaggagaatcacttgaacccggaaggtggagggtgcattgagccgagatcgctccattgcattccaccctgtatgacagagtgagactcggtctctaaataaatacataaatacataaaaatccaagacctgaaactataaaaaaatcctgcacaggaatctagtaaatacccttctcgacagaggcttcggcaaagcatttatatgtcaagtccccaaaaccaatggcaacaaaaacaattactgataagtgagacctaatgcacaacagagctgctgcacagtacaagaaactaccaacagagtaaacagacagcctatagaatgagggaaaatattccccaactatgcatctgaaaaacatctaatatccaggatttatcgtaaagaccttaaacaaataaaaccagaaaaaaaaaaaaaaaacaacttataaatgggcaagggacatgaacacacacttaaaaggaggtgtaccagtaaccaatgagcatgaaaacatgctcgatctcactgatcatcagagaaatgcaaatcaaaaacatactgagataccatctcacactggtcagaatggcaattacgacacacagtccacaacaacagaggctggaggggcagatgagcaaagaaatgcaggtccactgttgggggaaatgcaaactagttcagaccccctggagagtagtgtggacatttctcaaagaacttaaaagagaactaccaccccacgctgcaaccccactccgaaggatctacccaaaggaaaatccttccaccaaaaacacacatgcactcatctgttcatggcagtactactcacaatggtaaagacatggaatcggccttggtgcccatcagcagtggatcagagaaaggaaatgtggtatatacacaccacggaacgctacacagccataaaaaacaaatccatgcccttaccagaaacacggacagagccgtagtccattatgaacaaaaggcaagaacagaaaaccaaaattttcaaaacagctacaaaggtcaattgtgaatattctctccacagagaaatcataactctggagctcacagagatgctagacactgcaacttcattatgatgccacttttacatagatcaaattgtcccttacagcagctggttatacacacatactctacggcaatgaaattgctatcccattctggtaacattcattctcagtggagtgagatgatatctgagtgtggttttgacttctcgtgaggatcagtaatgttgattcagaatcttttacctgtgcatccgtctcaggtcttcaggtcctttgcccagtcttacacattaaattgaaacaagttcacaataacttggcaaacatcactcaccacaagcaaaatgtaaatcaaaaccacacttagataccatctcattctaactagaatgagtgttacaaaaaaagacaaaaaacattgaaagaaaggcaaatgctggtgtgtgtttccagagagagagagagagagagagagacactcttctccagtttgtgagaaggtaaactagtacacacgctacagaaaccacttggaggttcctccaaaccttaaaagactccaactaccatttcaaccagcaattctactaggaatacgctcaaagccattgaaatcaggacaccaaagatagatctacccacccatggggattccagcactgttcccaagagccagtataagcaatcaacctacctgcttatccacagatgaagggataaagaagctgctccacaggtacatactgggatactcttcagacagaaaaccacaatgaaatcatatcgtggggaaccacacggttgcacctggaggacatgatggtaaattaaatgagcaaggggggagagacaaaccttgagtcatctcactcatgcagaatctgagaaactctatctcaaagacctggcgaccacaatattggtttccagagattgggggaaaagaggggtaatgggcaggaactgtaaatgggtacaaagttacacataaatgagaggaagaaaattctgttgtgctattccactgcagggtgaccacagttaacagtatcagcacatcactttcaaagcagcttgataggagaatactgaaggttctcaccataaaggaataaacaatgggaaaaggtaacagaaacactaagtaccctgacttcatcattccacaatgtatgcatggaccataacgccccactctaccctctcattgtactgttcctttactatggaacacatttgtcgaaagaaatagaaatacacgatgctaatattcacgtgggaccatgaagcgaactgagtttcatcctcagcaatcctgagacatccagactacatcggatacatcactccctgatttcaaatttcatggaaaagctagggatccgcttccacacacagcagtggaacacaagagaggaccaagaagtaaaaccacacactgaaaactatctgatctaacacagaatccacaaaagtaagcaaagggaaaaggacaccctattcaatcaatggtgctgaagtaagtggctatcaatggtgcagaagaataacactgggccctccctctcaccagacacaaagaggaaatcaagatgaatgaaagatttaaacgtaaaaactcaaactattaaaatcttatgagaaaacttgtgaaatatccttctccacataggctttggcaaagcatttagatggctaagtcctgaagagcaaaggcaacaaaaacaaaaattgacaagtcagacctaacacctgaaagagctgctgcacaaaagagactaccaacagagtaaacagacggcgtacagaatggaacatgttcccaaactgtgcatctgaccaacgtctaatatgcagaatctacaaggcccttcaacaagtcaaccaggggaataaacagaaaaagaatatcccattaataaacgggcaagggatgtgaacacacactgctcaaaagtcgatgtacaagcaaccaacaaataggaaaacgtgctcaaactcactcattatcagagagctgccaatcaaaagcatgacgagatgccattccacgcaggtcacaatggtgaggaccacgcaggcaaagaacacatgctggtgaggcagccgaggaaaggaaacgctggtacacttccgggtgggatgaaagctagtacagacaccaccgaaagcagatcggggatgtctcaaagagctgaaaacagaactaccatctcacccagtaagcccactcctgtgcatctacccaaaggaaaattaatccttgtatccaaaagacacaggcactcgtatgttcacagcagtgttactcacaatgtcaaagacatggaatccacctagccatcaacagtggatgagaggccggcacagtggctcacacctgtaattctagcgctttggcaggccgaggcaggtggatggcttaagtccggaattcgagaccagcctgggaaaaatggtgaaatcccatctctacaataatacaaaaattagctggatgtggtggtgggcacctgtattcctatctaatcaggaggctgaggtgggaggatcacctgagcccggaacatggaaactgcaggccactgtcataagtgaactaaggcccaaatagaaaaccaaatgccacatgttctcacttataagtggcattcagagctaaactttgaatggactcaaacataaagaagagaacaacagacacctggaatgaccaccagaccaataaaaaaacaggggagaggaagagtgtgctgcagacccaccctgtgggccctctgctcactgcctgggttatgtggttgttgggaccccaagtctcagtgtcatgcaataaacagatgtaactaacttgcatatgtaccttttaaactctaataatgagagtagaaagcattaaaagaaaaatccaaggttagaacccaagaaaataataaatgaaaaaacaatctgtagttatccaaacaatccatgactgtcacaaacacagaacgaggacctaagtgacagaatgaggcagccaaatactctatccaacatgatatgtaaggaatacatttttcaaaaccccaaaaagatacaatgggaaaggaagagtctggttcaattgattttgagaaaactgaatatccacaggtaaaacactgaaatagggcccttacgatgcacgatacacaaaatcaacacaaaatgaattaaagacctaaactcaatcttgaaactgtaaaggtcctataagaaaatagagagcgggtgtatattttaggaaacctgtatctatgcaaacaggctgcaaaaggcaaaaaagcatcataacactaaaaaaaaaacacccacagacaatgcaaggcatggctgtgcgtgtgtgtgcgtgtgtgcgtgcgtgcacacacgcatgtttctgtgttttgtggaagtggggtgttaaacacaaaaatcactgctaacatatgcaactataaccatatgagactagggacactttgcaacttctacagggaaaagaaaacaatgaaacaaacaaaggcatcctaaagactgagagaaactctaaaaaatcctacccctgaaagaggttgttatctactacatacagtaaactaatatgactaagtgtaaaacaacaacaacaacaacaacaacaaatatccaaggtaagaggatctaaatagacctgagtgaaaaggtggcaggaaattgactcacaggtgacagtttctcaatatcactaatcctcacaaaaatgtgaatcaaaaccatactcggttaccatctaattccacttagaatgagtattacaaaagacaaaaatcaaaattgttgaaggcaatgatcagtgtagacttgcaggaagaaaaaaatcttctacactctttgtggaatgaaaattactatacactctataaaaaacttttggaagctccttaaaaaagtaaaaggtaggctgggcgcagtggcacacacctgtaatctcagtactttgggaggccgaggcaggtggatcacctgaggtcaagagttcgagaccagcctcaccaacatggtgaaatcccgtctctactaaaaatacaaaaattagccaggcgtgatggcaggtgcctgtattcccagcaactcgggaggctgaggcaggagaatcgcttgaacgtgggaggcggaggttgcattgagccgaaatcgcgccactgcactccagcctgggcaacaagagcaagactctgtctttaaaaaacaaaacaaaacaaaactaaactaaaggttaaagtacaactgccactccagctaacaatcccaccactgggtacatgtttagagaaaatgaaatccctgtgttatctgccttttcatgtgtcctgaagtactagtcacaatagccaagatgtggaatcaacctacctgtctatccacagatgaagggataaaggaaccacagtatatatacacaaggaaacacacttcagctctaacactttgggaaatcatgtcatctgcaaccacttggagaaatctggaagacaattaggtgaaatgaaatgagtctgctagggagacccacactgcatgacatcaggcatatggaatccaaaacacattgtctcctagaagcagaacttccaataggggttactacaggctggggagagcagggagcctgggcagggatgggtaacgggtacagagtgatgctcagatacgaggaatccattctggtgttctgttacacagcagggtgactaggtgactagggtcaacagaatctacaaaaatttttcaaaatcagctggaaaatacggttctgaatattctctccacagagaagtaacaatgatggaaggtcacagagatgccagatatgatgatttgatcatgatgctacatatacatgtcaaaatgtcccttgcactcttacggttgtgtgtgtttgtgtgtgtgtgtatatatatatacacatacacacacacatactctacagaaacaaaactgccatcaaatgttggtagtattcattctaactgcagtgagatgaaatcttcagtgtgattttcacttatgcttttgtgtgaatcagcgatggtgagaatcttctcttctacctgtgcctccacctcacgtcttcaggtcctccatccagtcctaacaacaaattaaaaacaaattcacaataacttagcaagtaccacttatcatacacacacaaaaatcaaaaacacactcaagattccatctcactctacatgcaatggatgctacaagaaaaaagttgaaacattaaagcacaaaaaaatcaaggtgtggatttccagaggaggaacttgtctccacagttgctgggaaacggtgaactagtacgcacactaaagaaaccacttgggtgttccttgaaatcctaaaacttcaactaccgttttctccagcaattctattcctaggtatatacacagagcacgtgatcaggacatggaagagattatctgtcatcccaggtggaattcagccctatgcccaaaagccaagataagaaatcagcctacctgtccatccacagatgaagggatgaagaatctctagtatacagacacaatgggatacttttgggccatcaaaattcatggaatcctatcatttccagcaacatggctacacctggagatactatgttcaatcaaatcagaaaggcagactaagaccaagcctgcatgttctcactcatgtaggagctgaaaaatttaactgactgaaggtggaaatacagcagtggtcaccacaggctagctggaggagaggatatcaaggattggcaataggtacacaataggtacacagagagttacaggagaggaatacattctggtattccactccaaagcacggcgacgatacttaacaacatgatcatgccattttcaaaacagctaccaaggaggatactgaatgttcacacatcgaggatataaaacctatacgtggtcacaagcatgggaaactccctgattttatccatactcaaggtatacaaacaagtatcacaatgtcccaatgcacccctaattctggacatgaagtatgaaacaaacgttttatgaaatgttaacgatacatggctaaaaattcacatggaaccaccaaagacccaaagaacctgaatatgcaaagcaatcctagggaatacaaactcaattggaggccgcacaatccccagtttcaaattacaagtaaaacctccactcatccaaagactacagtagtggcataaaaatgaatccacgaacctagggacgtaagagaacctaaacacacacctgtacgcagtcaacacatttttttcaaagaacacctagaagatgcaatgaggccgggtgctgtggctcacacctgtactcccagtgctttcggagaccaagtcgggtggatcacttgaggtcaggagtttcagaccagctttgccaaaatcgtgaaatcctatctctagtaaaaatacatgcaaaaccaggtaacccagccaaagttgggcaatgaacccgaagagacatttctcaaaagtcccagctactcgggaagctgaggtgggagaatcacctgagccccgggaggtcaaggatgtagtgagctgagattgcaccactgccctccagcttgagcaaccagagccagacactatctcaaaaaaaaggaaaaaaggagaaagaaataaactacacagagaaagacaaacatcacattttctcactcaggaggaatccacaaaactttatttcatagaactagtaagcataactgttcttaccacgggtgggggttgaaaggtggggcatagtcagagattggaaacggcataaagttacatactccgtgagaggaatgaaacctgtagttctattccacagcagcagggtgactaggtctaacattatcagagcgtacttttcaagaaagctagaaaaagaggatactgaatgtcttcacctcaaaggaataataactctatgaggcaagagagatgctaaataccctgatttcatcattacacaatgtacgcatggaccaaagtgtctcattctaccttctggtagtacacctttaccatagggtaaatttttataaagaaatttaaggaaacaggctgagcatggtggctcatgcctgtaatcccagcattttcagaggctgaggtaggtgcatcacttgaggccaggagttcgagatcagcctggtcaacatggtgaaaccccatctctactaaaaatacaaaaattagccaggcatggtggcacacgcctgtaatcccagctactttagggagactgaggcaggagaattacttgaacctgggaggcggaggtttcagtgagccaagatcgtaccactgcaccactccatcctgggtgacagcacaagactctgtctcaaaaaaacaaaaaacaaacataaaaaaaaacgtgtatttggccaggggcagtggtcatacttgtaatcccaacacaccaccacagggaggctgaagagggaggatcacttcagcccagtagttcaagaccagcctgggtaacatagagaaaccacatcttccctaaaaaataacaaaaattagctgggcgtggtggtgtgtgcctgcagtcccatcagccccaagtacttgggaggctgaagtgggaggattgcttgagccaggagtttggggcggcaacgagctacgatcttgacgcagggtaggtagtcaaggaagtgaccgtgtccttcggacgtgccaaccacggcgctgagacatctgatgtgtgaacaagcatgtacagctacagcccatgtgcacccagaggatgacccagaacgtgcttagagtaacacctcttccaactccttaggaattcatcatggaagactcccagaaagggagtttccccagtaataatcagcgctctctcatccttaggagcagactgccctgaatcctctctcagggtgaaccgtgtattttggacttcacgatctttttttagatggggtctcgctctgtcacccaggctgtctcagcctcccgagtacctgggattatataatggagtgttgcaatctcagctcactgcaacctccacctcccaggttcaagcagttctcccatctcaacctccctagtagctgggattacaggcataagccactgcacccaggctattctgcacttaacttgcaaaatacttttccctttacaataaattgctctatgctgcatcacctttgctgtgtgatttcttatttaaattcttttttatttattttaattattcattctttttgagacagggtctcactatgttgcccaggctggtctcgaacttttgagctcaagcggtctgctgaccttggcctcccaaagtgctgggatgacaggcattagccaccacacccagcctaaattctttgaaacttacaactgcggccccacaacagctgtcaatcatcgcaccactgccatccagcctgggcaacagtgcaaggcctcatctcacaaaaggaaaaagatatatttaaaaaaaaaaaaattaaaaaacatttttttttcttaaagacagggtattccagccatgtgcggtggctcacagctgtaatccttgcactttgggaggccgaggcgggtgaatcatttgaggtcaggagttcaagaccaaccaggccaatatggtgaaaccccatctctgctaaaaaaaaatacaaaaattagctagatgtggtggaaggtgcctgtaatcccagctactcgggaggctgaggcaggagaatcacttgaactcgggaggtggaggttgcagtgagcccaagattgcaccagtgccctccagtctgggctcctacagagtgagactctagcttaaaaacaaataaaaataaaaaagacagggtctccctctgttgcccagaccagagtgcagtggcgtggtcacagctcactgcacccttgacctcccaggctcaacagattctcctgcctcagcagctgggactactggcatgcatcaccatgcctgacggtttttaattttttgtggtgatggtctcgctatgttgcccaggctggtcttaaactcctggcctaaagtgatcctcctaccaagtcctccttacaaagagctgggatgacaggcgttagccaccgcacccggcccctcgaagctgcctgttccttgagcacaatgtgtagcaaggggagctagagtgagagcagcaccgtggggaagggacaggattgccaccctgagctgtgtgacgttaggccagacccctcttctccaagcgagatctaccacatgggtgatttcgggagcccacgccggctcagacagcctggattttagcttcataggtggatgggaacctatgaaggtttagagatgctgggagagctttccaaacagagaacaaacacagccaccctgggccccactgagggaggatcttaccagaagccctcaccactgtctcgcttcacgccggtggtgacggtgacgtcatcgatgtaggtggggggtgtcgtgtatagaagcagagaccacagcagtcctgcgtagctgaagaagtcaaagtctgtgttctggacaaagtaacccttgggatacctagggcgggagaattgtggttcgctgggcccttgccatgggtcttttgacctcagctcacatgcctccccagatccagggcctcctctctgcgaaggccaccctgtccctggcaggaagaccacagggtggggcgggaaggtgggtgcgtgcagtggaggcaggatggtccccacttggaggtgtcggtcatgtacagatggtccctggtggcagggttggggggtgagcgtgttgttgatggcgatagtgatgcagaggtgggagggcaggggctccacctggaacaggctgctgatgtcggcctcaaaggggaggtagcccccttcatgctctaccgtgtcgaccccatttacccactgcagacataggagatatggggagggggtggcaggtcagggcatgaggaggggcactgctatcaggcactccctcacataacctgcagtatggggatcgggggcctgccagccagacgggaagaatgacatcccaatggggtacatcaggccacctatccctctacacagggcacagcctccagggcagggcaaggacccccaccgtcccaccccagaagacaggctatgggtggtagctgagggtcccatgctgttcagcagctgtgcccacccacccgccctgcctgctcctggcctcactgaccacgatggcatagaagtgggcactgccaatcctcagcaccactcttgtgcacaggtcctggatccatcgctccagcagggtcacctcccgttcataccacaaccagctgacaaaatgccgcagccgccagccctggccgatgtcgttgaagctggagggaaccggcatgtccacggtggggcctgactgcgaagagaagggctgggctcagctcctaggccccccaaagggatccaggaccagtgtactgcacagccacgcccccaggcctagcgcaaacactgacacacggtggggactcctggtggaacagacagataacttgctgatgacaggtcaattgccagggcggtttgtacacctgggccagtggggccaggagttcctccttggagcggatggaacccagtatctcccaagacaggggtgagcccaggggcacatcccagcacgaggcaagaaggttcagacctgtgactaagaggcagatggcccactgcctgtcacagggaggaaggctggttagggggatggggggtgctttgcttaggacactgtgagtggggcacacgctggcacccagccttctcctctctttctcctgtactgaatgccgtaaagtcagaaaaagaggatgtaggctgggtgcggtggttcacacctgtaatcccagcacttcgggaggcagaggcaggcagatcacaaggtcaggagttcgagaccagcctggccaatatggtgaaaccccatctctactaaaaatacaaaaattagctgggtgtggtgggcctgtagtcccagctactcagcaggctgaggcaggagaatcacttgaacccggaaggctgcactgagccaagatcgtgccattgcactccagcctgggtagcagagagagactccgtctcaacaaaaaaaaaaaaaagaaagaaaaaaagaaaaagaggatgtacaccaggcaaacgcggcccaaacctcatcggatcccacttctctgctgaccacatccaagtcaggaggggaagaggggtggcgtccttggcctgaggtcacattctgtcctctatctgaaccgtgaaaaccaaggtaccttcccaccttggcagagctgacctcaaaatatctaaactgtcgcctcctcccgatccccgggcccagctctgggcagcgcctgcctctcaggcctgacgagtgcctgggtggctcatgcctgtaatcagcacttcaagaggttaatgtgggaggatggcttgaggccaggagttcgagacgagcctgggtaacttagcgagacctatatcttaaaaatacgaacaaaaaaaacaaaaaaaattgattttgtttttaagacggagtctcactctgtctcacaggctggagagcagcggcgtgttctcggctcactgcaacctccgcctccctggttcaagcaattctcctgcctcagcctcccaagtagctgggattacaggtgctcaccaccacgcctggctaatttttgtatttttagtagagatggggtttcaccacgttggccaggctggtcttgaattcttggcctcaggtgatcggcctgcctcggcctcccaaagtgttgggattacagacgtgagccacgagcccgaccaagtttgtttgtttgtttgtttaaattagccaggcatggtggtcccaggtaacttgcaaggctggggcgggagaatcgcttgagctcagaagttaggattgcaccactccgctcccacctgggcagcagggccaaacccggtctcaaaagcatttcaaaaattaaaattaaacattagaaagaaggacactgcccgggctcagccttcgcctaggaacgggactcgacaggagcgcttcttcctcctcccgcctccaccgctccggccctcgcgggtcccccaggtactcccgttctccaatcccgcgcccccaagcccgttgacctttaacctcctccgggcccccagctccggggcactacggtgaaggaggctgcagggcgccggggcttaccccattcccaccgccgggcttccgggcgactcctggccctgccccgagtccgcgcctccgacagcggtcgccggtacctctgctcctcgaagccccggcgtcggttgtcggagaagtcggcgcggaagcttcagaggccgtccagctgcttgcgctgccacgacgggctctctcggggatacagcatcccgtccggtagcgccaacgtgcagccatacaacagcagccggagagccgcccaggccactgccgccccccaggcgaggcttccccctccccgtctcggccgcagtctacggggataagagctgcgcgggaggagcattgcggcaaggtcgcgtgacgcgccggtagcgtgacgcgacttaggtcgtccgcgccatctttgttgagggcgattgccaggcctggaggggcggggcggcgcctgtggctggaaccctgggctaggcctttagggaagcgggacccccaccctcagccccaaccaagaagggcgtcgtctgctccccatcgtcgtctgctctgtgctggatgatccagggccacaggccaggacagaacccctgagattggtgggatccccgtttcttcaaggggcacctccacttgctttccccagcaggaactagagcaggccccagtggagcctcttccatgactgctggatgcagcctcttgcaggcatgcacgtccttgggaggcggcggtagccctgaccctgggcctctgggacctcgaccctaaccgaggggccagaagctccctcttggcgttgaagacacatgaagatgcagggagagaggccaagtgcagtggctcacgcctgtaatcccagcactttgggaggctgaggtgggcagatcatttgaggccaggagttcgagaccagcctggccaacatggcaaaaccccatctctactaaaaatactaaaaaaaaaaaaaaaaaaaaaaaaaaaaagccaggcatggtagcaggcacctgtgatcccagctacttgggaggctgaggctggagaatcgcttgaacccaggagacgaaggttgcaatgagccgaggttacaccactgcactccagcctgggcaacacaacaagaatctatctcaaaaaaaaaaaaaaaaaaaacattgcacagagagggtgccctgcgggaccccactttactccagtagggaaggcaccgtgtggaagggtagaggaagagatctggagacagtaaaaaagacaaaggtttattgaggggactttcacacaggtgcagtggctatggctggacatgagaaccactacatgatttgtaaaaaccatgcagcttccataacattttcacctaacatcctcgaccagttaccggtggaaggtatccaacttcccagtggtgaatccatacacatctgtagcaacctcaattcttgccgcctcagaagaaagaatttgaccgagggtcataaggcagaaaccagacagaggcaagttgcagagtaggagtaaaagtttattaaaaagcaggccggggccgggcatggtggttcatgcctgtaatcccagcactttgggaggctgagccaggtggatcacctgagctcaggagttcaagatccgcctggccaacatggtaaaaacatgtctgtactaaaaatacaaaaattagctgggtgtgatggtgagcgcctgtaatcccagctactcaggaggctgaggcaggagaatcttttgaacctgggaggtggaggttgcagtgaacgagattgagctactgcactccagcctgggctatagagtgagatagtatctaaaaaaaaaaaaaagtttattataaaactttagaacaggaaataaaggaggaaaggaaagaaggaaagtacaacttggaagagggccaagcagtcgacctgagaaaccaagtgcccagcttgacctcttgactcagggtttcataggttggcatcgttccaggatcttgccattcctgattccttagcttggggctccgaacacacattcttcttagaccataaagtcattcttcttttttttttttaattttatttttttgagaaggagtcttgctctttcgcccaggcggcactgcagtggcactatctcggctcactgcaagctccgcctcccgggttcacgccattctcctgcctcagcctcctgagtagctgggattacaggcgcccgccaccgcgcccggctaattttttgtatttttagtagagacggggtttcaccgtgttagccaagatggtatcgatctcctgagctcgtgatccgcccgcctcggcctcccaaagtgctgggattacaggcgtgagccaccgcgcccggccgaccataaagtcattctaagggtacacatcagttatggctgttgggtgcctctgccatacagaggggtccctttggtcctaggaacctggactggacacagttgtttgtacgattactcccccaccccattttttcatgctcgccaaatccaccttctgagaatggaccttaatactggaaggataccccagtatagtgaaaataaatacattctaggaactgacaaggcctaaaggctttttcccaaatgtttatgcttgttttcttatttagttatttagtttttttttttttttttttgagacagagtctcgctctgtcgcccaggctggagtgcagtggcacaatctcggctcactgaaagctccgcctcccggattcaggccattctcctgcctcagcctcccgagtagctgggactacaggtgcccgccaccatgccaggctaattttttgtatttttagtagagacggggtttcactgttagccaggatggtctcgatctcctgacctcgtgatccacccgcctctgcctcccaaagtgctgggatcacagaagtgagccaccatgcccagcctattttctttctttaaaattttacttgtatattcctttagtaaaatgcttacatgcttaaattaggatatagttcactgttgatgaggcagctttaggccaaatttaacaaaagtaagaaaaagtaggatgccaaagtttatacagtatgtaaaaatcagtaattcaggacgggcttagtggctcacacctgtaatcccagcactttgagaggtggaggcaggaggatgactggagcccaggagtttgcaaccagcctgggcaacataacgagaccgctgtctctacaaaaaataaaaaaattaaaaaattagctatgtggagtggtgcacgcctatagtcccatctacatgagaggctgaggcaggaggattgataaagcccgggaagcagaggttgcagtgagccgagattgtgccactgcactccagcccaggtgacagagcgagaccccatctcaaaaaaaaaaaaaaaaaaaaaagactaaagggtgccagagaagatgccttccttttttccttttccttctttctttttttctttttttttttttttttgagagtcgcgctctgtcgtctaggctggagtgcaatggcctggtctcggctcactgcaacctctgcttcccgagcttcatcaatcctcctgcctcagcctctcatgtagctggactataggcgtgtgccacctggttcaagcaattctcctgcatcagcctcctgagtagctgggattacaggcgcccaccaccacgcccggctaatttttgtatttttagtaaagacagggtttcaccatgttaaccacactggccttgaactcctgacttcaggtgatccgcccgcctcggcctcccaaagtgctgtgattacaggcatgagccatcgcgcctggtgaattcaaatattttttacgtttacagttggttaagaaagcaaagctttatctaaaaccttggggtcagcagaagggatgttaagttttcacctgtgagtctgattccctccaagcccctcaggaagaaatttagaacaaagaactccaatcagagttcagcccttggttcacccttatctgaggtcaacgtgaaagctgtcgccatttttcatctggttgaggtctgcgcttctgaaaaacaacttagggacatttgtcaagatgttatctttactttctataggggatcaaatatcttgtggctctaaccgacttgggtggctgttgttctgagctattattactttttcttgttttttgttttttgtttttttttttgagacggagtcttgctctgttgcccagactggagagcaatggcccaatctaagcccactgcaccctccgcctcccgggttcaagcaatcctcctgcctcagcctcccgcgtagctgggattacaggcatccgtcaccacacccagctaatttttgtatttttagtagagatggggtttcatcacattagccaggctgatctcgaactcctgacctcagttgatctatctgtctcgacctcccaaagtgctgggattacaggtgtgaggcactgaacccagccaattattaccttcttctcatcaagttgctaatttacttctcaagatagctaggtgcccggaatttccctcgaagggtaatgtggtttgggtatgtgccctccaaatctcatgttgagatgtgatttccagccaggcgcagtggctcacacctgtaatctcagcactttgggaggctgaggtgggcagatcacttgaggtcaggagttcaagactagcctggccagtatggtaaaaccttaattctactaaaaaaaaaaaaaatacaggccgggtgcggtggctcatgcctgtaatcccagcactttgggaggccaaggcgggtggatcacaaggtcaggagatcgagaccatcctggctaacacggtgaaactctgtctctactaaaaatacgaaaaattagccaggcgtggtggcgggcgcctgcagtcccagctacttgggaggctgacgcatgagaatggcgtgaacccgggaggtggagcttgcagtgagccgagatagtgccactgcactccagcctgggtgacagagcaagactctgtctcaaaaaaaaaaaaaaaaaattagccgggcgtggtggtgtgcatctgtagtcccagctactcgggaggctgaggcaggaaaattgcttgaacctgggaggcagaggctgcagtgagatgagatcacaccactgcactgcagcctaggtgagagagcaagactctgtctcaaaaaaaaaaagagatgtcattctcggaattggaagtgaggcctggtggcaatgatgggatcatccccttggtgatgagtgagctcccactcaggtagttcccatgagatctggctgtttataagagtgcagcgcctccctgttctctctctcactccctctttcaccatgtgacatgccgtatccccttttgcctttgtgaaaagaaaataaatcttgggacccctcctaccctgacaagtcactaagccaaagggaaaagtcaagctgagagctgcatcaggaaaaggtaggataggcatgatgggggcagagagggctctcccctcgcccactagaaatgtcagcagatggtttggcgatcatcccattgcctctctaaaagggataaattggccgggcacagcaccttgtgaggccgaggcgggcggatcacttgatgttaggagatcgagaccagcctggccaacatgatgaaaccccgtctccactaaaaatacaaaaatattagctgggcatggtggtgtgtgcctgtagtcctagttgctcaggaggctgaggcaggagaattgcttgaacccagtaggtgaaggttacagtgatatcgcaccactgcactcaagcctgggtgacagagccagattctgtctcaaaaaaaaaaaaaaagtgacaaattggcagctggcaccaggaaaaggccattgcctgctggtccacacctgttgcattaaagtatgaattgaatgcaggcacaagggagaggcacaagggggcttctgataaaatgtcaggtattggatgagtgagtccaggcatgtgcagtaagagacaaaatgggggagtatgacctttcgggggcactccaccagaaaagggaagaaagccttagatgggtgtgcacagaagtttctaaacacatagcgggtgctcacctgccccctgtggcagcccaccctaaaggaaggaacatgggaaagaggccagcctataaagtcctagggtcaaggttaaacaccgcacttgaccttggtgccctcttgggtctcttccaagcgtacttttctttcctttctttcctattctaaagccttttaaataaacttccactccagggctgagcacggtggctcatgcctgtaatcctagcattttgagaggccaaggcaggtggaccacttgaggtcaggaattcaagaccagtctggcaacatggtgaagcatcgtctctactaaaaatacaaaaattagccaggtctggtggcacatgtctatagttccaactactagggagactgaggtagtagaatcacttgaacccagtgggtggaggttgcagtgagctgagatggtgccactgcactccagcctaggcaacaaaaaaaaattttttttttttttgagatggagtttcgctctgtccccaggctggagtgcagtggcacaatctcggctcactgcaagctccgcctcccgggttcatgccattctcctgcctcaccctcctgagtagctgggactacagccgcctgccaccatgcccggctaatttttttttttgtatttttagtagagacggggtttcaccgtgttagccaggatggtctcgatgtcctgaccccgtgatccacccgcctcggcctcccaaagtgttggaattacaggtgtgagccaccgcgcctggcctaaaatattttaaatatataagcaaacaaactaacttccactcctgctctgaaacttaccttggtctctttttctgccttacacacctcagttgaattctttcctgaggaggcaaaaattgaggtcactgcaaacccacacagattcactgcctggaacactgataccttccaccgatatcaaagctgcctcatattttattcctaaataagatagcaacaaagatttttttaaaaagctacatatgccaggtgcagtggctcacgcctgtgatcccagcactttgagaggctaaggtgcgcggatcacttgaagtcagaagttcgagaccaggctggccaacctggtaagaccccgtctctaccacaaaaacaaaaattagccagacatggtggtgtgtgcctgtaatcccagctactagggaggctgagaaaggagaatcgcttgaacctgggaggtggaggttgcagtgagccaaaatcgtgccaggttttgtaatgtgtttcccgtctttataacattagggtctgatggacttagacgtcccagttcccaggattggggtaagcagaatactttcttttctttttttaattatcttttttttggctgggtgtagtggctcatgcctgaaatcttactttgggaggctgaggtgggcggactgcttgacctaaggagtttgaaaccagtctaggcaacatagcaaaaccccatctctacaaaaaatacaaaaattagccaggcatgatggcacatacctgtagtcccagctgctcagtgggctgacgtgggaggatcgcttgagcatgagaggttgaggctgcagtgagctgtcatcgcaccattgcactccagcctgggggacagagcaagaccctgtctcaaaaaaaaaaaaaaaaatgtgggtagtagaggagaaataatgtttgaaggctgggtgtggtggctcatgcctgtaatcccagcattttgggaggctgaggtgggaggatcacctgaggtcaggagttcaagaccagcctggccaacatggcgaaaccccagctctactaaaaacacagaaaattagccaggcatggtggcacgcacctgtaatcccagctacttgggaggctgaggcagggaaatcgcttgaaccccagaggccgaggtggcagtgaactgagattgcaccactgcactctagcctggatgaccgagcaagactctgtctcaaaaaaaaaaaaaaaaaaaaggaagaaaagaaaagaaaaagagaaaaaagaaataatgttggatatgtatggacccagaagctaatgtgtgtaaagtatttccagtcatcagagaagtacaattgtaagcgtataattccattcttgttgatacctagtcataatatctcatcaatcctaacagaatggcctcaatcatttggtatatgcaatctcacacgtagagttttgttttgttttgttttgtttgcttgttttagagacagggatgtgctctggcacccaggctggagtgcagtggcacaatcatagctcaccgcagctgccaactcctgggctcaagcaaccctcctgccacagcctcctgagaagctggacacaggcatgggctaccacacccgggtaacttttttaacatagagtttgcatttttatgagaattttgtgcagtagaagttattacaatttttgtgtttgtagggtacaaacctgtaccagtactataaacaataataatatcttttcatgaagtcacagcccaatgtgtcagttcacatttttttttttttttttgagacggagtcccactttatctcccaggctggagtgcaatggtgcaatctcggcttactgcaacctccgcctcctggattcaagcgattctcctgtctcagcctcccaagtagctgggattacaggcacacgacaccacacatggctgatttttgtatttttagtagagactgtgtttcaccatgttggccaggctggtctcgaactcctgacctccagtgatctgcctgcctcagcctcccaaagtgctgggattacaggcataagccactgtgcccagccttcagttcacatcttagcacaccaggaaggctatgtggttctacagcaaatagactaaagaaatgcttcagtaataaaactcccacatatattcatcaatatatcaatgtgtgttgagaaagaataatttgactacataattatgtagtttagtaccaagtagcggctttttgagacagggtctcactctgctgcccaggctggagtgcaatggtaccatcatagctcactgcagccttgacctcccgggctcaagtgactctcctgcagcagccacctgagcagctgggaccacaagtgcacaccatcatgcctagctaatttttctattttaagtagagacggggtttcaccatgttggccaggctggtcttgaactcctgacctcaagtgatccacccgcttcagcctcccaaagtgctgggatttcaggcgtgggccactgcacccgacctatttttgttattattattattattattattttttggagacagggtctcattctgtttcccaggctggagtacagtggcaccatcacgtctccctgcagcctcgaccttctaggctcaagtgatcctcccatctcagcctcccaggtagctgggaccacaagcgtgtaccaccatgctctgctcatttttaaaatttttggtgacattttggagtctcactatgttgttcaggctggtctcaaactctttggctcaaatgatactcccacctcggccccccaaagtgctgggattaaaggcttgaaccaccatgcccggtctcctggtgcacttgaaatataatttagactcctcacaatggccaacaaggctttgtatgacccagcccctgctgtatgacccagcccttactctcattcactgttttccaaacattcaagccactttctgttcctcaaaagcccattcctgccttagagacttcacacccgtagctcttacaatttctgcttctttatcattgaagcctcagctcaaatgtcacatcctcagtaagctcccatctgcccactttttaaattatggtaactaaccatggaagttcagcaaatatttctttctccctctttttagacacgaagtggaattgcatgtctttgactttgtcatgtgaggggtgaccatgtgacttttttggtccataaaatgtaaagagcaattttttctttttttgagagacagggagtgtctcactctgtcacccaggctggagtgcagtggcacggtctcagctcactgcaacctctgcctcccaggctcaagtaatcctcccaactcagcctcccaaatagctaagattacaggcgaatgacactgcgctggggtaattttttgtattttttgtagatacgggtttttgccatgttggccaggctgctctcgagctcctgagctcaagtgatctgcccgccttggcctcccaatgtgcctggattacagatgtgagccaccacacccagccttaaacagcaaaaaaaaaaaaaaaaaaaaaaaaaaaaaaaaaaatttgaggcggaatctcactctgtcacccaggctggagtgcaatagcgtgatcttggctcactgcaacctctgcctcccaggttcaagcaattctcctgcctcagtctcctgagtagctgggactacaggcatgtgccaccacatccagctaatttttttatttttagcagagatggggtttcaccacattggccaagctgatcttgaattcctgacctcaggtgatccacccacctcggcctctcaaagtgctgagactacagaagtgagccaccacgtccagcaggcagcaacatttttaagagccaatgcctgattttctgcatcatccctttttcctgtcttggtgatcacagaagcacgtgtcgaaattgagcacctctcagtcaggatccctgagcaacttatggaaatcaaagccccctttccaaccagtgatggatgtgtaggatgaatgagaaataaacctttattgagtcaaaagactgaggttttggagttgttactgcagcttaattagcctgtcctgactgatacactatgtgccagaccctcatctggggtctctacccacattatctcatctacttctcacaacatccgaataaagtagcttgtccgcttataaaggaatagctgaggctgaggctgggtcatttgtcttttttgtccaaaagagacttgtttggctcatggttctgcaggctgtactagaagcatggccccagcatctgtttctgctgcaggattggaagcttccactcatggcagaggcaaaggagagctgtgtgcagatcacatggcaaaggaggaagcgagagagcagaggtgccaagctcttccaacaaccagttcttacagtaactaagagtgacaattggccaagtgtggtggctcacatctgtaatcccagcactttgggaggccgaggctgggggatcacttgaggtcaggagttcgagatcagcctggccaacatggcaaaactccatctctactaaaaatacaaaaatcagccaggcatggtggcaggtgcctgtaatcccagctacttgggagactgaggcagaattgcttgaacccaggaggtggaggttgcagtgagctgagatcgcaccactgcactccagcctgggccacagagccagactctgtctcaaaaaattttgaaaaagctgggcgcagtggctcgtgcctgtaatttcagcactttggaaggctgaggcaaatggatcgcctgaggtcaggagttcaagaccaggctgatcaacatggtgaaaccctgtctctactaaaaatacaaaaattagctgggcctggtggcgggtgcctgtaattccagctactcgggcggctgaggcaggagaatcgcttgaaccccagaggtggaggttgtggtgagctgagatcacaccattgcagtccagcctgtgcaacaagagcgaaacttcgtctcaaaaaaaaaaaaaaaaaaaagaaaagaaaaagaaagaaagaaagcattttgtagtcaggctctcactatgttgcctaggctggccttgaactgttggcctcaagcaatcctcccagctcaccctcccaaagtgttgagattataggcatgagccaccatgcccggcctcaaagactttcaaatttatgtttgaagaaggaactgacggagtcatgggttttattatatactcatatattgcaagaaaagagaactgccaattttcatactctgggtatatatgaatgaaatgtatagtttttatttttttttacttcattttattttattttatttttgagatggagactcgctctgtcaccaaggctgaagtgcaatggtgccatctcggctcactgcaacctctgcctcctgggttgaagcgattctcctgcctcagactcctgagtagctgggactacaggcgcccgccatcacacctggctaattttttgtatttttggtggagacagggtttcactgtgttagcctgggtggtctcgatctccagacctcatgatccgccctcctcggcctcccaaagttctgggattacaggtgtgagccactgtgcccagtcagatttttttaatagaaatggggtgttgctacattgaccaggcttgtctcaaactcctggcctcaagtgatcctcccgtctctgcctctcaaagtgctaggatgacaggtgtgagccaccgtgctcggcccatatgtaaataaatacaagtgtttatatctttatgtgtacagagatgtcatttgatattttaattgttactttaatattctaatagcaatatcatgacaacaattatcaaacacaacatccaattagaataacaggcatttctgatctcccacctcagctaccttttgtgcggtttttgaggttaaaggtttttggtttcggggtttttttttttgcaagacctaaaaataatgtctgaattctgagtgtcttcaaagaccccttccctttgtacaaatactgccagggacagttgttttattacttaaaataaatgttattgaagtatagtttacatacaatacaatgcacttattttaaatgtataggttttttttgagacagggtctcactttaactgtacagtttgatgaggcttagcaaatagatatatctgaatacccactgccactatcaagatatagaactttctgctgggtgcagtggctcatgcctgtaatcccaactttgggaggctgaatcgggaggattgcttgaggccaggactttcaggacagcctgggcaacgtaggagctacctggctacagtttttttaaaaaattagccaggcatggtggcatgcacctgtggtcccagcttctcaggaggctgaggcaggaggatcacttgagccaggagttggaggcagcagtgagctatgaccacaatactgcacttcagcctgggtgacagggcaagatgctgtcacaaaaaaaaaaaaaaaaaaaaaaattaaagccgggtgtgatggctcacacttgtattcccaacactttgagaagccaaggtggaagcattgtttgaccccaggagttccagaccagcctgggcaatatagtgctatatcatctctacaaagaatatttaaacatttagccaagcgtgttggcaaaggcctgtggtcccagctacttgggaggctgaggtggaaggatcacctaggcccaggtcaggaaggctgttgtgaattgaggcagcgccactgcactccagcctgagcaacacaatgagaccctgtctcaaaataaaaacaaaaacaaatcaacaaaaaagaactttccctaggccagtgtggtggctcatacctgtaatcccagcactttgggaggccaaggcaggctgatcacctgaggtcaggagctcaagaccagcctggactacatggtgaaaccctgtctctactaaaaatataaaaatcagttgggtgtcgtggtgcatgcctgcaatcccagctactcagaggctgaggcaggagaattgcttgaacctgggaggcagaggttgcagtgagccgagatcgagccactgcaccccagcctgggtgataaagtgagatcctgtctcaaaaaaaaaaaaaaaaaaaaaaaaagaactttctcattactccagggagttccctctgacccctcccagtcaatccaccttccagccctgacccaggcaaccactgatctgctctgtgtcactatggattagatttggtgtttccagaattttatatcaatagaagtatacggggcgctcttttagatctggcttcttccacacagcatgtttttgagattcatccattttctgcatgttttagtatcttgttcccaagtatcacttttagcaacagaaaacagaacaaatttcatgagtatatcaattacacaccttattcaggcaagattctttgaatcaattttatgacatgaaatggtgtctaccactttgcagctgctgaaaagagacacatcctctttctttctttctttctttctttttttttggagacggagtttcactcttgttgcccaggctagagtgcaatgggacgatctcggctcaccacaacctccacctcctggattcccggattcaagcgattctcctgccacagcctcctgagtagctgggattacaggcgtgtgccaccacgcccagataatttttgcatttttagtagagacagggtttcaccatgttgacaggctggtctcgaactcctgacctcagatgatccacacgcctcagcctcccaaagtgctgggattacaggtgagagccactgcgccttggctctctttcttgtctccctgaaattgcttttctctcacaacattctcaagctcgatatcagttttccataagctgcaaaaaaaaaaaaaaaaaaaattaaggccaaggagctcaaaacctaacatatgaaaagggaaaaggcaagatgggaattttaaacaggaggaatgaggggcacataatgtgtttctcggttccacctgatataaattcttatctgtagcctgagagcagcatagcaagatcccatctctacaaaaaaatacaaaaactagccaggagtgctggtgcacacctgtggtcccagctacttaagaggttgaggcacaaggatcttgagcccagattgaggctgcgtaagctgagatcacaccactgcactccagcctgggtgacagagtgagaccctgtctctaaataaataaattagcatgtgttccactcaccttctcacatctccctgattaatctttgaaatttggcataatctgaaattaccactgagcagatatggtggctcacgcctgtaatcccagcactttgggaggccaagtctggaggatcacttgagcctaggagtttgagagaagcctgggcaacagagtggggccccatctataataaaaatgtcgttaaaggtcaggcgcagtggcttatgcctgtaatcccaacattttgggaggccaaggcgggcggatcacgaggtcaggagatcgagaccatcctgggcaacatggtgaaaccctgtccctacaggcgtggtgcacgcctgtaatcccagctactggggaggctgaggcggggaatttcttgaacccaggaggcagaggttgcagtaagctgagatcgcaccactgcactccagcctggcaacagagtgagactgtgtctcaaaaaaaaaaaaaaaaaagttgttaaaatcagccgggtggcatgtgcacatagtcccagccaccttggaggctgaggtaggaggatcgtttgaccccaggtgtttgaggctgcagagagctatgatcgcaccgcttcactccagcctgggcaccagagtgagactctctctcaaaataaaaagaaaaaagaaacaaattactttgtttatttctctgaatgcctgtggtctgcaattctgcagcctttgcctcccaagtagctgggactataggcgtgcaccaccatgcccagctaatttttgtattttcagtagagacaaggtttcgccatgttggccagtctggtcccgaactcctgggctcaagcaatcctcccacctcagcctcccaaagtgctgggattacaggtgtgagcaactggcgcccagccaatacctgaagttccagctcatccatattaactgctggagtatgttccatggtgtggattcaccactatccttttcctgttgagcatttaggctgttttcatttttcacttgttcaatcaatgctgccatgtacactccagcagtacactgcagtagtggcttgtgtgagatttctccaggtgtgtcctagggttggagctgctgggttgcagggtctgttcatctccaaggaggttgtccacaccagggcttttaccgccagctgcctcacaatagagaagcatccagtcaccagggcctcccttggccccatgcaggtccgggtgtccaccccaatcaacagttttgcttatttctggtccacaaaaaggtttcagttattttgatcttggctagaccttttgggggtcttttttttttccttgagatgtagttttgctcttgttgcccaggctggagtgcaatggtgcaaccttggctcactgcaacctccacatcccgggttcaagtgattcccttgcctcagcctcccaagtagctggtattacagaggcccgccaccacacttggctaatttttttgtatttttagtagagacggggtctcacaacgttggtcaggctggtctcaaactcctgacctcaggtgatccacccaccttggcctcccaaagtgctgggattacaggcatgagtcagcgtgctcagcctattattactgtaataatatttgtcatgctgatctatgaccggtgatccttgatgttactattgtatcagtgcaaaagtaattgtgggttttgtcattaaaagtaatggcactaggctgggccctgctcagtagcttatttggtaagccggtgggtcctgaaagtttgctttttttttttttttttttttggatatgaagtctcattgtcactaggctggagtgcagtggtgcgatctcggctcactgcaacctccgtctcccgggttcaagcaattcttctgcctcagcctcctgagtagctgggactacaggtgtgtgccaccacgcccagctaatttttttgtatttttattagagatggggtttctccatgttggtcaggctggtctcgaactcccgacctcaggtgatccgcctgcctcggcgtcgcaaagtgctaggattacaggtgtcagccaccacgaccagccgaaagtttgcatttctagcaagttcctgggcaataattatgatggccaagaatgacagtctgagaacgactgctctggaagattttatctgtgacccagagctttgacccttttggggatttggtgtgtcatgtccttactgctggagtttgctttagttaacaaaatctgtcattgctcccaaatcacttggtaggggttattcattcttccttgagttgagcttctttatctttgctgttaataaaatgtaagtttcaaacatttcttttttcttttagggacagggtcttgctctgttacccaggctggagtgcagtggtgccatcacagctcactgcagcctcccactgctgggtgtggtggtgggcgcctgtagtcgtagctacacaggaggctgaggcaggagaatcgcttgaacctgggaggcggaggttgcagtgagccgagatcgtgccactgcactccagcctgggcgacagagtgagactctgtctcaaaaaaaaaaaaaaaagaaagaaaggaaggaagcaaggaaggaaacagaaaagaaatgaagcctgacttcaagaagttccaacatagcatggaggaggagtgcagggagcacgagggcgtgtgggggggcgtctctgttgggaactcagggaagatgttcttgatctgattaattattcaaccaaaatgacaggctggattctaggcactgggagtaccctgaaggggcttctagtaaacctgtcctctgcattgggtcttggaagatagggggaatttgcccaaggaagaaggggaaaagaacattgcaggcagagggagaagtctggacaaaaagggtgactggcctgcttgaagaacaggaagtcatccaagtggctataactataacaaaaggtagggaggagacgtggaaagagtttgggggaaggctgtgaagagctttgaatgtcaagagagggagtttgatcttggtcctttaggtcatagggagccccagtcaattttaaaatcagaagagccaaatttattttattttatttttatttatttatttatttttagacggagtttcgctcttgttgcccaggctggagtgcaatggcatggtccgggctcactgcaacctctgcctcccaggttcaagcgattctcctgcctcagtctcccaagtagctgggattacaggcatgcgccaccacgcccagctaattttgtatttttagtaaagatggggtttctcaatgttggtcaggctggtctcaaactcctgacctcaggtgatccacccccctcggcctcctaaagtgctgggattacaggtgtgagccactgctcccggccaaaaccccatcttaaaaaagaaagaaaggaaggaaggaagataaatctagctatagtattgagctatatgggatggaacagagggagaaaaagagaccaatggctggaatgtgttgtggtttgacgatttctagccctggctcaacttaagaatggaattacttggagttcccagaatggatccaactgtttcaagccttcctaaatgctcttccctgtgcctgggatgcccttccctcagtgtcggtcttgctacctcccattcattcatcagtattctagccaaacatcatcaatgtcaggtaggctcccagttgatccaggtgtccaactctgggctcccatgtgatcctgagtagtacgggcatttagcgatcttttcctgatttgggagcactgtagtagtgccttctgggccttctccaccacccaagtggtaagctccttgcaagcaaagctt

SEQ ID NO: 25 - DNA, 173602 bp, Homo sapiens
gaattcaaagggggcgcctggctcagcttcaggatcagggagagcttcctggaagaggggacatggtagctgagacctgaacaacataggggtgagccagggggagcagcatgtgaaaagtttttgaaattggggcacagaaggaaggtcaggtgggtctagaatagaggaagtgagagaggatggatgattcaacaggcggcttagaaaactctggaactgttacttagggtatgaggggcagcttggcattgcaagaaagagatcgtgactcactcagctgcctcgttttgctgccctgcttccgtcttgctcctgctacaggcagtcacaaagtatctgccctgataaagcataaggccgagccagctggctctggagccagagtgcatgggttcaaatcctgactccccgacttgctaactgggtggcctcagcaggtcagctcccctctctagggactactttcctcagctctaaaatggagatgatgcccaggcacactggctcacatctgtaatcccagcactttgggaggctaaggtgggaggatcacttgagcccaggagttcaagaccagcctgggcaacatagtgagaccccatctcaattaaaataaaataataaagcagagtagatgatgatgcttttgtctcctaggaagctctgtggttatgagcacttgacctcagtgtgccaggccatctgtcacccttgcttgtggcaccatttacaagcactaggctagctggctgcctgggctggcaagacagtcctttacatcccagccatggttcattgggaaaaatttgtcacccttgcatgcttccgtgtgctccatctgcagactgggagaaatcacagactccccgcacaagacggttgtgaggatcgaatgagtgagtgccaggaaagtgctcagagcaatgcctggcacagcgtaagccatcaacaaatgtgaattcccactggatgtcatgactgccctgcatcataatctcactgcagccctgtgagggggtacgcattcattcactctgttactgctgtggactgaatgtttgtctctctgtcattcagatgttgaagaaatcctgatcctgcacgtgatggttttaggaggcagaaactttgggaggtaatcaggtccctcccaatgggattagtgctcttataaaagggacctcagagagctctcttgttcactttccaccacgtggggaatgcaacaagaagacagcagtctgtcacccaagaagagagcccccaccagaacctgacaaagctaccaccctcatataggccttccagcctccagaactgcatgaaatagctttctgttctttacaaatcacccattctgtggtctgttctagcagcccgaactgaccgagagccactcaacatatatttcgtgagtgtctactgtgcctgttctaggtgctggggacatagcaggtaatgagaccatcagacgaggccaggtgcagtggctcatgcccataaatccaacactttgggaggccaaggtgggatgattgcttgagcccaggagtttgagaccagcctgggcacccctctctacaaaaaaattaaaataaaaaaaataggcatagtggtgcgtatctgtggttgcagctactcaggaggctgaagagggaggattgcttgggtctgggagttcgaggctgcagtgagccatgatcgcaccgctgcactccagcctgggtgatggagcaagactctgaaaaaaaaaaaagaaaaagaaagaaagaaagagaaagaaaggaaagaaagaaagaaagaaagaaagaaagaaagaaagaaagaaagaaagaaagaaagaaagaaagagaaaagaaagaaaggagggagggagggaaggaaggaaggaagaaaggaaggagaaaaaaaaaagagtggggtaaggaatatgattattccatcccatagttaaaaacactgaagctcacagaggtgagatgacttggataaagtcacaggacatctcaggccctggccctcaacctccatgtgcgtgtgcctttttccaagggcccttcgctattccccagccacacctttctgtacacccagatcaatgaacaccaatgtggccacatcaccccgccacgccttcagactctatgggtccctgtactgaaggcgcctgacccagaccagcccagcattcaaggcctctgccacccacctcgttcttcccagaatgtctgaaccttctgaccacccaccttctcctaagccagcttccctccccaccacctctgccctgaggcactctcccctcttcccctcctccccatccaagacaacagagctgctgctggaatggacttcccaaatctgccccttcatgcaaaagcagggtttcctctcctgaaattcccaccaactcacccactcagcccccagggcagattctgttttttgctgccccaaggaaagaaagggactttctgggcccctccctgtagcacaacttccaattatttccaacaggtgaaaataaaccaggtcctctccacttcccacccttacctaccaggtctcagccatgcaggctggctcaaaattgtgtcttcccatgggactgacctcccagcccaggatgctgccctatgactgtgccctcactgaggccattcactcagcaaagatttgtatggccctactatgtgccaggcactgtttcaggtatcagggcacgccagcaaatgaaacaaacagagatctctgcctttatagaaatgacatgtaatgagtgctgggaggggaggagggagacagataataattgagatacgtggaaaataaccggctgggcacagtggctcatgcctgtaatctcgacatttcgggaggctgaggcaggaggatcacttgaacccaggagtttaagaccagcctgggcaatgtagcaagatcccatctcaaagtaaataaataaatgtgcttttttaaacatttaaaaacatgaaaatattaaaattaattttttttttaaaaaattagaaaacgtagccagccacagtggctcatgcctgtaatcccagcactttgggaagctgaggtggaagaatcacttgagcccaggagttcaagaccagcctggacaacatagggagatccccatctctacataagatcaaagttagctgggtatggtggtgtgtgcctgtactcccagctactcagaaggctgaggcaggaggatcactgcctggagtttaagaccagcctgggcaacatagcaggatctcacctcaaagtaaataaataaatgcttttaaaaaatttaagaatgcagaaacattaaaaataaaaaaataataattaggaaatgtggccaggcacagtggctcatgactgtaatcccagcactttgggaggttgaggtgggagaattgcttgaacccaggagttcaagaccagcctgggcaacataaggagaacccatttcaacacaagatcaaaaagttagctgggtatggtgatgtgtgcctgtactcccagctactagggaggatgaggcaggaggatcacttgagcccaggagtttgaggctgcagtgagctataatcatgccactgcactccagcctgggtgacagagtagctgggattttgtctctaatataaataaatgaataaataagtggaaaattactaaactatctatgatgttggaaagtgatgtgtgccatgggggatgagggcaggcagcgtcagagtgccagagtgggcacgcaggattcaatgctaaagcaggcagtctgggtagccccatggagttttaagcaacgacttgaaggaggtgagagggcaaaatgtacatacatttggaggtttctaagaattaattcacttctgaaaaaaaaaaaatgcaggcagagtcccaaggagccattccctgcctcctgcatttaaataactgagttttctatctgctgccacaataaatgcctccagacttggcagcttaaaacaacataagtttatccttttgcagttctgtagatagaagtccaggatggctaaatgacttctctgctctgggctttatggagctaaaataaaggtgttggcagctgagctcttaatgggggagctttgggaagaatctgcttccaagctgtcattcaggctgtggttggcagaatcaaactccttggtattataaagctggaaacctgtttctgcgatggttgccagctgagggctgcccttagctctggaggcctctctcctgtccttgcctttgagcctgtacatctcagagccagcaacgccacaacaaatccttctcgggcttgggatctctctggattccctgtctgctgcatctcttcacaattttttttttctttttagagacagggtctccctctgtcgcccaagcagtggtgcaatcatagctcactgcagccttgaactcctgggctgaagaaatcctcctgccttggcctccaaaagcactgggattacaggcatgagccactgcaccaggccctctgtctgccgtgtctctcttctgcttccagctggggaaagttatctgctttgaagggcttgggtgattaggttggacccaccttgataatccaggataatctccttattttgaagtttgtaactgtattagtccgttttcacactgctgataaactgagcagcttacaaaagaaagagatttaatggacttacagttccacatgacgggggaggcctcacaatcatggcagaaggcaaggaggagcaagtcacatcttacgtgggtggcagcaggcaaagagagagcttgtacagggaaactcccccttataaaaccatcagatctcatgagacttattcactctcaggagaacagcacaggaaagacctgcccccctgattcaattacctcccaccaggtccctcccacaatacatgggaattcagatgagatttgggtggggaccacaaaacctaaccacatcagtaaccttaattacatctgcaaagtcattttgcttttgtaatgtaacatattcacaggtttgttcattttttatggctgagtagtatttcatggtgaatatatatcacaggttccaggaactaggatgtgggcacctttggtggggggtcactattctgcctaccataatgacatgatgtgaaagcaggaatgtctagagttcaggcagccattctgagaccatgaagtagcaagttcagcaggatatgcaatgcactgagggtggagggatggatgagaggatatcactgagccatagaataaacctagggcatcttgcaaaatgacaattatgatttttgccgctgtgatccaggttgtcttttgtttgcagctgaatgcattctacctggctcctttccagatcaccattggaagtgtttattggaagaccttgcatcaaaaccctgatctttcagaaacatagagtttgtagtagtgttctttttcttaaagtgtgctaaaacttgtaaaatcgactttgagaaagagcctactcaaaattactcttctgtttaaacagagattccagtctaagctcccttttatcccatatggggaaactagggcccagagggtacagtgaagtttttctccagggtcatagaactgagtcttcttggaacatctgggaaactcagttttgtaccattgactttttgtgcttttcctgtgtacaagaagcaagatcagtataaatgggaaaataaataatgcagatccaggtaatagaatcccaacatctcatacccaagaacccctacacacacacacacacatgcacacacaacacatcatcatcatcgttgtcgtcatcgtcatcctcatcatcaccatcattatcctgccccctgcagcctctacaccatacttgtttccatgactccttaaattcctagaatggcacagaaaacagacaaaagattagctcacagatgctattttattaaactcatgatgcccactgacatagaaagggacatatgttttctgagtcatggttcaaaggagtaaactttcccagaagcttctccagctgagatatcctcccctcaccaatataacaatttcactaacactctcccacttctacccactctgtcatcataagcatccacatcccactctacccagtcagagctatgacttcttcttctagaacttgggacaccaccaattagagagtaaaatactttggatcttccaagtaacctgcaggatacttttttttcttttttttttttttgagacggagtttcactctgttacccaggctggagtgcagtggcacgatctcaagtcactgcaacctccacctcccaggttcgagtaattctcctgcctcagcctcctcagtagctggaattacaggcacccacgaccacacccgactaatgttttgtatttttagtagagatggggtttcaccatgttggccaggctggtctcgaactcctgacctcaggtgatccacccaccttggcctcccaaagtgctgggattataggcgtgagccaccgtgcccagccacctgcaggatacttttaagttcacctcaagatcgtgcattaacaattttgtaaggtgcttagctcttgtctcactactaggaagaaaagagtgtccaatcttgcattatcaagccagccatgaaaattccatttaagggagatggtggggacaaagaagcatggatgagggtcagacagagttctgtggtaggaaagtgagaggctcccaggagctgaaggatgttagagatcaactgatgacatgaggatattagctaatgctgccaaggactctgtacagactcctcagcctcccaggtagctgggattacagacacatgccacggcacccagctaattttttttgtagcgtttcagaggggagtctctctatgttgcccatgctggtctcgaacttgtggcctcaagcaatcctcccatctcagcctcccaaagcactgggattataggtgtgagcaaccgtgcctagtctgaactgtgaattttttaatgcaaaagctgactgagctacttgagccacagcccttagagagttacacataatatgcaaagaaggaatgcaacataagaaagggtattctacatcataacacttctttttttttttaaattttttgagacagagtttcgctcttgctgcccaggccagagtgcagtggtgccatcttggctcaccgcaacctccacctccggggttcaagcaattcccctgcctcagcctcccgagtagctgggattacaggcatgtgccaccacacccagctaattttgtatttttagtagagacgggatttctccatgttgatcaggctggcctcaaactcccaacctcaggtgatctgcccgcctcggcctcccaaagtgctgggattacaggcgtgagccaccgcgcacagacaacacttcttaactggtggagtaaacgtgtggaggtggtctgtgaagctacaaggtaagtcctaatcatcatgcaatcccctgtctaaagcatttttgttttaaaaaaggaaagagattggggagtgattacaaccttctacctttcaatgaagatcacctcaaatctgttaaaatagctggctcagtgtctctttttggccttgggaggagttgaaatctctggtcagggtgttgaagactggtcacaatgcagttgacatctccatgcctctggaaaatatgaaaccttgctcaaccctacccaagaaagggactttctgttctggcctccatagccagaaacgcctctgcctcccccagctgtggaaggaatacttgattcccaactcagggtcagctgcccttactctctgctcaattcctcttttttctctgaaacaaaatatttgggcatctttctcgataccctcctttccctaaatcacctccaacatccaatcaatcaccaactcctaagggttccatctttgaaactcattaaccttcttttctgcccccttttctccatccgcatgaccttaccctaggcaatacctccatcttctctcgcctgtaaaactgctctgagttccccaaccctgacccccagcctccctgtcagtatacttaacccctccaacatgcccaccacaattctggccacctttccaaatcccagctctgaattagagtctctctctctcccctctaaacagagaggctcaaagaccctcagctgaccctacaagaagtctgggatgctgccattctttcctggtaaatcccctcccatgatcccttactgtccacagggtgaacatctaattcttcagtctggcatctgaagcttctgaagcatctggaggtaagtatttcatccttaccttgctgagctgaactccacaggattcctgggctggagagaaggaaagaagagttaagtcccaagaggcgagtggaaaaggtgtcttcctctgcagctaagccaatagcaggctgtcttcatcccaccttctgaaggagggaaagggggcaaaaagttgagatctctgcttcctaggcgagcccgaggtcccagagaaccctgaaggtagagcaaacctcgtgttatcatggtgaataatattggcgtccatcccaggaaactgagctaatgctctctgcccagatgtgcacagggatgacacaccacgagcgatcttggtcccatcccacccctattctgctccaggcttcaggtagcacagtggttaaggacccagactctacagtgagagagaaatgggttcaaagctcccccagctcctctgctcaccgtctatgtgacctcgagcatgagacagagcctctttaagccccagtttcttcttctgcataataggtgtaaccctagctcctccctcctcgatgaaatgaggagacgctgaatgcagtggctcagcagagggtgaaatacagcaagcccacaggaaatggggctgcagtcatttgtctttgcacaactggtagtaggatggagagtggacgctcaaagataccaggtcctaacccttgcaacctgtaaatgttacgtcataaggaaacaaggtttttgcagatacaattaaggatcatgagatgaggaggtcatctagatgatgcgagtggacagtaaatgtcatcatgagtttcctcattaaagagtagagggagattggacacccacagaggagaaggcaatgtgaagagaagcagaaggtgacccggacacaagtcacagaatgccaccagccagcagaaacatgactgcagcagacccagggtcccacgcccagaaacctccagaacacctcaagggaattgtaaaccagcaagagatagctttacatttttttttttttttttttttgagacagggtctcactctgttgcccaggctggaatactgtggcatgatcatggctcacagcagcctcaaactcctgggcccaagcgattcgcccatctcagcctcttgagtagctgggaccacaggcatgtgccaccacatccaactaattttttgtatttttggtagagacagtttcaccatgttgcccaggctggtctcgaactcgtgagctcaagtgatccacttgcctcagcttcccaaaatgctgggattacagtagtaagcctctgtgcccaacctaggtagtgatatttatgattagccatgccataattataatatgatattatacctagggtttagcggacactatataaatgttagttgtaactaataatggttattttaacaatattattaatagacaaatttagttaccatttacatatacagacattagctaagtcctgatgatgccggtgaattgtctccacaactataaggtaatggctacctttatccccatttcacaggtgaggaaactaaggcaatagtggttaggacacccttccaaggttgccactgcgaggagctggtgacagaggggtttgaattcacttccatctgactcaagagcccaggatcgaactcaggacaaatgggtggtgccccagcgccagtgctgactgccagttcctgagcaggttcttcccctgcaggcccacccactggtcctcagtgcccctggtccctgccagtgaagtttgcagctcccagataagtagccccctctgggatccccactcagtcctggctccgtgacctctgaggggcccagagctggtacctgggaccttatgaccccaacacagtagccagcagtccctgtgagcaccacgctgatcaggacactcgaggcaatccctgcgatgcctccagcaggaatagtggtcctgagtaaggccggctgcagttcatccccaggaacctctgcaggaaagagagagagaaggagaaagagagagatagaaagagagagagggagggagaggaagagagaggtgtcagtgctggggctctgggtttcaggtcctcagagctgttccctccatgtgctcaattcgaaccctcctctccccccattttacagattgggaaactgaggcccagggaaaggaagcgtctgtaccagataataaatataacactcacagatgacaggaataatgtctggtaaactatattatctcatttattcctcaagacaaccctatgaggaaggcattgttaatatccccattaaagaaacaggcactgagaagttaaactacccatccaccatcacacatggggtagagttagaatttgaaacatgttgatgccagagcttacactctgaacctctgcactatgtggcctctgaggatcacattcatccattcctcattcaacgaacatttatttagcacatactgtgtgtgccagacacctttttaggcactcgagggatattgcagaaaacagaacagacaaaattcctgatgtcctagagcttacactttaggagggaactgagacataaaacacacaatgagggccaggtgtggtggttcacgcctgtaatcccaacactttgggagtccgaggcaggcggatcacgaggtcaggagatcgagaccatcctggctaacacagtgaaaccctgtctttactaaaaatacaaaaaattagccgggcatggtggcacgtgcctgtagtcccagctactcaagagactgaggcaagagaatcatttgaacccaggaggcggaggttgcagtgggtcaagattgtgccaccgcactccaccctgggcgacagagtgagactctgtcaacacacacacacacacacacacacacacacacacacacacacacaatggagcaaatatataaagtgatgacaagcattataaaggagtagaataagatgctattcgaggatctcacaggaggaccagacttagtctggggaaatcagggaacgcatcctggaggaagtgacatttaagctgagatccaaaagacaagtccaagatcagctggtagaggggttagtctcctgagcaaagtggccagcattcattcattcattcatttattcattcagcaagctgttctaggcactgatgatacagcagtcaacacaacagacaaggtctcaaccgtcacagatctggccacctggatggagagattgatgataaataattaggccctaataataattagggcctggcatggtggctcacacctgtaatcccagcactttgggtggccaaggccagtggatcacctgaggtcaggagttcaagaccagcctgaccaatatgacaaaaccccgtctctattaaaaaacatacagccaagttcagaaggaccacccaactgacctgcagacttacaagctgtaacaaattcttattgtcttgagccactgggtcttggcagggggggcattttatgcagctttgttgaggtactatatgattgacccaagccccagaacccacttatatcaggcaagagactctgagccattatcaccatggcatctcaacacccacctgagatccagatcttcccattgactgagctgcagaggtgagtgatgctgttggaggcctcacaggtgtacctgccctactggtccagagtgacctcagaaatgaccaggtgctgggtggcagggcctggccttctgtccatctcccagtggtactgggcaggggggtttgagtcagcaaagcaggacagggtgagggctgccccagctgtgacctctgggtctggagggttgaccataggagggtctgggccatctgcagagaattgagaagaccaggccagagggaagaggaaaggcctttgtccatattacaatgcattggccattgtctcagatgacactcttccatccccctccagtgcacaactgcatttgacactgttggccatctcccttctagttgctttcttgtcccctaccaccaccaccacctccccataccatattctctacttctactgtgcagctagaggtatccttttcaaagcttgttcaaacctgcgtcacatcatgtcccttctctgcacaaacccttctttggctgctgtctcatgcagggtaaaagccaaagccctcatcatggcccacaggccctgcacagtctgtcccattacctctcttggggcaagacagtcctcttcttcctcactctccttcttccctttacttcagccactatgacctcctctctcaaaaccacactcccaccccaggcttggcatttgcagtctcccttccacaaaatctccccttggtgccctctctcactttgtccaggacagacacttccagctttgccaacagaaccagctaaacttcagccgctccttcacccctcaaccacactcctatgcacatctccacccatcctttatcaggtcctggactcacatgtaactttgatgagagtggggttgctgatgctgctggtggctgagttccagctctcacactggtagacccccgtgtcattcctggtgatgttcgacagagtcagtgttctgcagtccagggacagctccctgtggccaccaatgaagagcttctggccattgacatcccggcggatggccacagtgctccttggaggaaggcaatgcagactgatggaatccacatgctccactggggctaagttactggctgtgacattgggctgaggaagtgtctctgcaggaaaattagaaagaggtagaaatgctgagtcctgcccagatcatgggcttagagaagaacacccttagggaacacccttagggctgaaggaattcagcacacttgccaatcatccatccatgcacctgtccataagtccatctactctccaccaactcagcctttcctacattcattcacccaattgttcactcgtccagtcacccttctatttatccatccaccaatttgtccctcaatccacccatctatccatccgtcatccatccatccatccatccatccatccatccatccatccatcctatccataaatctaccttcccatctacctacccacccagggatgcatacatgcacccatcttctcaatcattcaccatttttttcacccattcgtccacccaatcatcttttccaatcacttaccacccacctaaattcgctcatccatctatcccttcatttacccaatcacctattcattcatcacccaatcacctattcattcatccaccaatccatccattgatcttcccttctgtctgtttacttaataaattaacacttctggagcaccaaatatgccccaggctttgtgctaaatgctttacagacacaatcttatatcctcatgcttatatttcaagagaagggtggattttaacccatttcacaggtgataaaactgagcaaacaataagaagaaccttcatcaattgagtacttaatctgtcgtagatgttttatgtgtgtgattcattagacttcacaacaaccctgtaaatccccatttgcaaaatgaagaacctgaggctcagggatgatccatgactaacccaagatgaggacactgatccatgggggcaaatgggattcacgctgcccatctgcctgcctctttcctttctcgctgacctgcattacacccagggtgatcgcccacacagctgagttgtaccctctgtagctcctacgaatcacctggatgttgagatgcactgtgctataacatccttttattctcctaagtcataatcacaccatacaaataagaaaaggatctcagaagggtaaccattgaaagcaaaaattttcatccctaaataacttttataccaatatttttaaaaatttggagcaagatagcacaactcttctttataaaggaaaatacgtatgcagtaatttataagaaatagatactggaggccaggcactgtggctcgtacctgtaatcccagcactttgggaagccaaggcaggcggatcacctgaggtcaggagttcgagagcagcctggccaacatggcaaaaccccgtctctactaaaaacacaaaaattagccagatgtgctggtgcacgcttgttatcccaggcggctgaggcagaagaatcacttgaacccaggaggcagaggttgcagtgagccaagatcatgccattgcactccagcctgggtgacggagtgagactttgtcttaaaaaaaaaaaaaaaaaaaaaagagagagagaaggaaaaaaaaaaagaaataggtactgggaatgaacctgtaagagggtataataaaatattagcagtggtcatttctgagaatgtagagtttttacccttttcctttttaaaaatatttgtattggtaatttctcttacactggatatacagtatgtattcaataaagaaataatcagaatgtaggatgtaatgtggctctatattaattaacagaaagacattaaagattaaaagatgaaatttaaaaacagtttaaacaataataagtatagtctaatactatttgttgtttaaaaatacatatatttggccggccacaatggctcacacctgtaatcctagcacttttggaggccaaggtggacggatcacttaagcccaagagtttgagaccagactgggcagcacagcaagaccctgtctctacaaaaaggacaaaaattagcccagcgtggtggcatgtgcctgtagtgccagctacttgggaggctgaggtgggaggatcaattgatcccaggaggttgaggctacagtgagcaaagatcaaaccactgcactccagcctggcagacagagtgagaccctgtctcaaaaaaaaaaaaaaaaaaaaaaagaagaccacacacatatatttgaatgtatatacaaaaacagaggaattatagaagccctgtggctttttctgggaggcttactgtggaaaacattttttgccttcttgcccatctatatgatttactttttctacaattattgtgaaatttatttaaaatgtgaaaaaggtggcatataatatttttaaagcaatcctatcaatgaaaagtcattttgttggttaaagaatgtaaaaatttattctgcataacacaggttagaaaaatcttgctgaatatataaagaagtgaaacagcaaagaaaagaattctaaaaaacaaaaccaaacccaaattcgccaatgaagtcctggggcagagaagaatttttctcttatttttttctttttcttttttttttctttgattttgaagatttcaccattaaccaataaccctcaaccctggcttcatacctgagacagtgatgatggtgtccatactgctgtgcaagccggaaagggagttggaggccttgcaggtgtagacccctgagtgtgccctggagagactgggcatgaagagggtctggccctcccatgtggtgaccccactgaagctccatgtgtactgggcaaggaggtgggagtaggctaagcagaccagagtgaggttggaaccaatcacaaaatctgggtccagtgcggtcacgatgggggtatccgggccatctgaacaaggagaaagacttcctaattaggaagagtatgagaagtaaggaccacccccctagattgtgcatttcagctcagtgttggaagcctgacatgttgagggaggcacacagcaccacaacgtaaaagtttgtcagaggaaggaagggagggaggggaggaagggagggagggagggagggagggaggaaggaaggaaggaaggaaggaaggaaggaaggaaggaaagaacaaacgaaccatggctggcggtagcctccctcttgtgtctattaccctccttgatctttgaagactgtcagctccatgaggacagggatatgcttgtcagttatgttaactgctttgactagaaataacacccaatacacacagcacacagtggatgctcagtagatgctttcccaaaagtagagagacagaggggcagagagagaaaaacacatgggttcaagttcttatctttcttcttgaccacggtgagatcttgggtgagcccttcccctttcttaatctcagttttcttgtttgtaaaatgtggtgtctctgaaagtccttccagttctgcaaatatttatgttgtcgagtctggaatttctgggatcttggcttcctacaatctccatctacctttgtacctgagattgaatgggtctgaaagtccttaattgggtacatagtagaaactcaatacatgccccttaaataaataaatgatgataaacttctgagagaatagtcattgtaaacgtctattaagcacttagtgtgcagagtagtggaaaagaataaagaaaaaaagagaaaaaaaagaagcacttgctatgttccaggcactattctaagttccttaaatgaactaactcacttaatcctcataatcacccaatgagatagataatattatgattctcactttgcagatgagaaaactgaggacatagaaaagtgaagtgacttgcccaaggacacctagctaagaaatagcagggacggctgggcgcagaggctcacgcctgtaattctagcactttgggaggctgaggcaggaggattgcttgagcttaggagttcaagactaggctgggcaacatagtgagactttgtctctaccaaaacttgtaaaaattagccaggcatagaggcatgtgcctgcgatcccagctactccggtggctgaggcaggaggattgcttgagcccagaagggcaaggctgcagtgagctatgatccagccactgcactccagcctggacaacagagtgagaccatgactcaataaataaataaataaaaggaacagaagcactaggatttgaaccaaggcagtctgtagagtctctgatttaaacgctaagctataaatcatggatgaaccagtagatagttgggctggaggttctgtgtggatcagaggtgagtcagagcaaagaaacccagacttacaagccacgccaaccacgagggcttcactgagcctggatcccaggtggttcctggcctcacagtggtaggtgctggagtcattgcgtgtgactgtggggatggtgaggaccctgccatctctggagattactggtccatccccttcctgaatcacctcaaggttcagaaaccactggaatgtcctgtcattgtttggagaaatgcatgtcaaattcaaggagtctgtgtgctccagaggggccaagttctgggcttccaccgggggctggtgcagcttctctggggagaaggaaagagaaagaatggcgttataggacatgggaggatctggaaccctaggaatgatcagcagcacgaataggctggggaccttggaaacaccagtgttggctttgctgtttccaagatgaccaataagcacacacacacacacacacacacacacacacacacacacacacagccaacagctctacttccggaagttcttaactgtctagagatcccagatcctctccccagaaatacacccaataacacacacaccacacaaatacctacacatttgtatataatttcaaggggttatggggcactctaaagaccaactttagatttcaagtgaggaatcttatacctagattacaaattagtaaatatctttcttttttgagacagggtcttgttctgttgcccaggcttcagtgcagtggcactaacacggctcaccatagtctcaacctcccaggcacaagcgatcctcccgcctcagcctcctgagtagctgagatccatgcatgtcaccatcctcagctacttttgaaaaacttttgtagggtggggtcttgctgtgctgcccaggctggtctcaaactcctgggctcaagtgatcctcctgtcttgacctcccaaagtgctggcatgacaggaagtaaatatctttcttgaagtcaacttagaaatacaagttgaaagttacacatgtttatataacttttgacccaatgattacacttttaaaaacagttttattgaggtataataagcaaataaaaatgttgtatgttcaaagtgtacaacttgatgttttgatagttgatctctacaatcaagctaattaatatatccatcaccggctgggtgtggtggctcaggcctgtaatcccagctctttgggaggctgaggaaggtggatcacctgaggtcaggagtttgagaccagcttggccaacatggtgaaaccccgtctctactaaaaaatacaaaaattagccaggtgtggtggcacgcacttgtaattccagctacttgggaggctgaggtgggaggatctcttgaacctggatggtgggggttgcagtgagccgagatcataccacgacactccagcatggacaacagagtgagactccatctcaaaaaaatgaaaaaaaaaaaaaggaagaaaggaaaaaaaactgctggatgcttgcttgcattgcttccattgcttgcactgcaagcattatctcatgtactactggtaccaccctgtgctgtaaggactattaatatcccattttacaacaggtaaactgaggtttatgttgggtaagtgagttgtgaaaaaccaagttgtaagtgggtgaatcatttttaaactcagggctatgtgactccaaacttcataaccactgtgaaataaatactatgtagaaaaatctatttttaaaaaatctcagaaaatgaagcaggcacagttttccctattccatcccgagcacagttaaaaaccttggatattatcacttctacactgctggtgggaatgtaaactagtacagccgttatgaaaaacagtgtggagattccttaaacaactaaaagtagaactaccatttgatccagcagtcccactactgggtatctacccagaggaaaagaagtcattacacaaaaaagatactcgcacacgcatgtttatagcagcacaattcacaattgcaaaatcgtggcaccaacccaaatacccatcaatcaacaagtggataaagaaactgtgatatatatatatatgttcatatatacgttcatatatatatgttcatatatacgttcatatatacgttcatatatacgttcatatatacgttcatatatatacgttcatatatgcgttcatatatgcgttcatatatatacgttcatatatgcgttcatatatatgcgttcatatatatacgttcatatatatacgttcatatatacgttcatatatatacgttcatatatgcgtttatatatacgttcatatatgcgttcatatatatacgttcatttatgcgttcatatatacgcgttcatatatacgcgttcatatatacgcgttcatatatacgttcatatatacgcgttcatatatacgttcatatatatacgttcatatatacgttcatatatatacgttcatatatatacgttcatatatatacgttcatatatacgttcatatatacgttcatatatacgttcatatatatgttcatatatacgttcatatatatgttcatatatatatatatatatatatatgaatgatggaatactactcggtcataaaaaggaatgaattaacaacatttgcaatgacctggatgagactggagactattattctaagtgaagtaactcaggaatggaaaaccaaacatcatatgttctcactgatatgtgggagctaagctatgaggacacaaaagcgtaagaatgatacaatggactttggggacttggggtgaagagtgggaggggagtgagggatgaaagactacaaatagggtggagtgtataccgctcaggtgatgggtgcaccaaaatctcacaaatcacccccaaagaacttactcatgtaaccaaaccgacctgtaccccaataatctatggaaaaataaataaaataaaataaagcaatagagaaaaagcctcaaaaatatgaacagaacatcattgttctatgggaataatatcaagcagtctatcacaggtgcagctaaagaataaataaataaataaataaataaataaataaataaataaataaaaatagatgactcggaaaggaggagagaatatggcagactggctgcggatctcaagaccggagaaagcacatggtggtgagttttctggactttctttgcgcctcacagatcccagactgggagctggagagcctggcaatctagaaatgccaatgagtgtagatccaaaagaggctcaagcaaagcctgctctagccaaaggacaaggagcagtagcctgacaagatttgctaaagacagcaaatctttacaagataatcactttgctgctgtgatatcccacagaaaagcctggacatttacccttgccagctgtacagagacacccatcccctccaccaggctgaataagcagctgggactgtcatccttgcccagcagtaatgagcaccgaccctgcagtgtccattgaggccactagggagcggtaacgaggcgtctctgccccttctgggcaagatggtatcagaggatgtctcagtggaaagcctgaactctgctaactgcccagagtaacagttgccccgccccacctggaatgtcaacagaggccaaatggggaacctggacctccatccccactggctataacaagatggtgccctttttgccccaccagcaagatgtcagaggagacctgctataacagaagatttaaatgagatccagcgtctcataatttccaaaatgtccagggtgttgttgaaaatcacttgtcatacacctacatgtaatcccaatactttgggaggccgaggtgggagaattgcttgagctcagaagttcgagaccagcgtgggcaacatagtgagaccccatctctacaaaaaaaaaaaaaaaattgactgaatgagaaagacattcctgaaattaaatgaggaaagacaattaatagagatgacatggattgttgttgatgttttctaacttggtcttgagttttctaggggatttagttgtagatgtttaaagtgtaattttcactggttacttctttatcttggtggtcggcctaatgcctacatgtctgacctgtgaccaggtgtccctctcacagtacacttattttttgtgtgtttgtttgtttttgagacagagtctcactctgtcacccaggtcggagcgcagtggtatggtcttggctcactgcaacctccacctcccaggttcaagcaattctcatgcctcagcctcctgagtaggtgggattacagacatatgccactacacccaactaatttttttttttttttaagtacagacggggtttcaccatgttggccaggctgatcttgaactcctagcctcatgggatcctcccaccccaacctcccatagtgctgcgatcacaggcatgagccatcacacctggccacagtacacttgtttataatggcagacattcttaaggcttttgtctgacctgtgtccagtttatttctacaaagagagccatgctttaggacagccctgaccaggaaagacgttaggtttggatgtgtcagtcaggtgagacacagaggaggcagcacaacaaaacacatgaaataacaggggcagtttattactcacagattccggagaagacagagcagcacatctcacagagccaacaggaagaagagagttgtcgggacacgcacactcaaccagcgggtggggagcaagaaagagaaagtgagagacctgtgggctgatgcttttattggagtctaaggaaactgctcaggcagttttccacagagaattctaactgggtttagagccagcaggcacaagttgcatggagtcacactgactgggaggtgatcactgtggcatatctgcacagcctatgcagggtctgggggtcagggggacagtcaggtgagttatatctagctgttgcataaggaggtggttaacaggaagtggtagtgtaaggcaggtatctggatctgccacattaaggatctggggggaggcggagacctggaaactgtgtcaagggtgactaagcttttcttatggtatgagaaagtccaacttatattcaaaatagatactgagccaggcacagtggctcacatctgtaatcccaacactttgggaggctgaggcaagaggattgcttgagctcaggagtttgagaccagcctgggcaacatagtgagacctccgtctctacaaataaaatttcaaaaaattagctgggtgtggtggcatacgcctatagtcccagctacttgggggactgagatgagaggttcacttgagcccaggagctcgaggctgcagtgagccgtgattgcaccactgcactccagcctgggtgacagagtgcgaccctgtctcaaaacaataacatttcaaaaattgatactgagtttctataaaattgtaagaattcactacactgatgttagaattgtcttaaaagaatcttagagcagccaacataaaaatgcttcaatgaacaattacaaacacttgaaataagtgaaaaaccagaaagtctcagcaaagaaatagaagatatgaaaaagaacaagacggaaattttagaatggaaaagcacaataacagaaattttttaaaaacttaatgtttgagcccagctgcagaatggagatgacagagataaaaatcagtgcagataaaagttaccaaatctgaacaacagaaagaaaatagactgataagaagtgaagaacagaactttgggacctgtgggactttaacaaaagagccaacattcatgtcattggagacccagaaggaaaggaggaagtgggtataatggctggtttcccaaatctggtaaaagacatacatctatggaatcaagaaactgagtaaaccccaatgccagcgtggtaatcaggattctaaatatagtccttccagatttctgttcctgattgttcagtcaaatgctaatctaggtattgctttgaagggattttgtaattaaagctcaaagtcagctgatcttaaaatacagatcatctgggtgggcctgacctgatcaggtgagtcttttaaaagcagatcagatgagaaagtcagagaatcaaaacacaaggaggattcaatgcatccttgctgtctttgaagatgcaggggtcaatgtgtgagcagggtagagtggcctgcaagagcttagagcacccgcagatgacagccagcaaggaaacagacctcagtcctacaactgtaagaacctggattctggccaggcacagtggctcattcctgtaatcccagcactttgggaggccgaggcagatggatcacgaggtcagtagatcgagaccatcctggctaacatggtgaaaccccgtctctactaaaaatacaaaaaattagccaggcatgctggtgggtgccggagcttgcagtgagccgacatcgccccactgcactccagcctgggcgacagagcgagactccgtctcaaaaaaaaaaaaaaaaaaaaaaaaaagaaccaggattctgccaccatctgaatgagcttggatatgggttctttcccaaagcctacaggtaaaccccagccaactcacatcacaccttgattttgacctggtgagagaacccagttgaggacacttggacatctgaggtacagaaactgaaatagtaaatgttattcactctcttagttcacccagaatcagactctgcactagaatgtaagtgcaattagtttattatttatttatttacttttttggagatggagtctcgcactgtcgcctgccaccacgccaggctaattttttgtatttttagtagagacagggtttcaccatgttagccaggatggtctcgatctactcacctcgtgatccacctgcctcagcctcccaaagtgctgggattacaggcgtgagccaccacaccttagtgcaattagtttattttggagaaagcattggcagaggtgtgggaaagtaagtaagggaaaagaaggaagccatatagaaaaattagctctatagaaaactggagctcacctctgaaaactggtaaaaaacacacctctgagggccgggcgcagtggctcacgcctgtaatctcagcactttaggaggctgaggcaggcagatcacctgaggtcgggagtttgagaccagcctgaccaacatggagaaaccccctctctactaaaaatacaaaattagcccggcgtgctgtcacatgcctgtaatcccagctactcaggaggctgaggtgggagaatcacttgaacctgggaggcggaggttgcggtgagccaagatcgtgccattgcattccaacttgggcaacaagaacgaaactccatctcaaaacaaaacaacaacaacaaaaaataaaaccacctctgagttgttccccctaagttcaggggaatatatctaccaattccttcttggtgttagttaatggtcactcccaggatgttaatttctctgacattttcagcctgccctcagttggggcttgcatcctcttgtactcagagaaatcagagaggcacagacactcatggaaggggttgcggaagtactcaccactctctttcagtcatttcgagaatttctcttctttcatcattcagtcgtcctaaaagtcctgtgtgtcaataataaattacacccactgaaaggaagacgtatatttacatttcatggcctttcattttctattagtgtccccttcattccactccatcttattattagaatgattctaccagtgtctttctggaaaataggtgtaggaataaatttattctaaaaaataaaacaacatctacgcaaagaggtcttaaaaccttcataattagctctataaaacaattaactccaagaagtaatgctgaatgctttccaaatgcatactgacagtaagaaaacattatcaaatacccacatttgcattttttctagacatggttacagacctaaatccctcagttgatcagcttgagggaccaaataaatctctgttatcggtatagcaacagcacttacttgttttgtagcagtcagggcataccaaagtaagatcaaagaaaaaatagaatctcacgaaatatattttctcaaggtaaaccctcaccaaattataattgaatgattagtctggtataattttagtagaaaaattataggaaaaaaaagacaggacaaaatatgataattgagttggcaaagatcaactcctaagcagctaatttagtgttcaataaaacccaaaaatgcagaagcatgattttcccatttatagtatgttcacatactataaatgagttattttaaccaatttagaagtaagacctggccaggcatggtggcttacacctgtaatcccatcactttgggcggcaagacaggtggattgcttgaggccaggagttcgagaccagcctggccgacatggccaaaccccgtctcttactaaaaatatcaaaattagctgggcggggtggtgcatacctgtaatttcacctcctcagaaggctgaagcatgaaaatcatttgagcctggaggcagagattgcagtgagctgagattgcaccactgcactccagcctaggcaacagagggagactctctcaaaaaaaaaaaaataggctgggcacggtggctcacgcctgtaatcccagcactttgagaggtcaaggcgggtaaggtgggtagatcacaaggtcaggagttcgagaccagcctggccaatatagtgaaacccgtctctactaaaaataaaaaaatcagtcaggcatggtggtgtgtgcctgtaatcccggctactcagtaggctgaggcaagaaaattgcttgaacccgggaggcggaggttgtagtgagcagagatcctgccactgcactccagcctgagcgacagagcaagactctatctcaaaaaaaaaaaaggaagtgagacataagtattgtattgtatcatgataaagcaattatttggcattacaccttaatgaattttatccagtcaatttgcctttgtagacacagagtgattcatgtaatatgatatgtagcataatcaagtttaatctctgtaataatggttgtttatctgtaggctatagttgtaaaagaagaataaataaataaagcaatctatcaatcttgatcaaacaatgtagcccacagttgattcagatgttacaataatgtagttggtacaactcactgggcagcatataccatgagcactaatgaaaaataaaaatcatggcaaggcgcgatggctcatgcctgtaatcccagcacattgagaggcagaggtgggcagatcacctgaggtcaggagttcgagaccaagctggccaacatggcgaaatcccatctctactaaaaaatacaaaaattagccaggcacagtggctcatgcctgtaatcccagctacaggggaggctgaggcagaagagtcgcttgaacccaggaggcaaaggctgcagtgagccgagatcgtgccactgcactccagcctgggcagtagattgagactctgtctcaaaaaaaaaaatgaaaaatgaaaaatgaaaagcaactgcatgaaagtcaattcagtttatgcctagccttcattaaagaccaacaagaaaaaataacaaaaaaaaacaaaaaataaatgtttcagtgaaaatctcatttgggctctcatctacaggacagagtgtagatggaaaatacatgtttgatgtaataactgatcttgtgatatacctttatgattgtaaatagttgatatattaagaaataatagtaaaataaatgttattttaagcctccaaatttgtgataattttgttaggcagcaataaataataaaaaaaaaaactaatacacccaaacagaataaacccaaatgaatctatgccagggcatatcataatcaaactgttgaaagctaaagatgaatttaaaatcttgaaagcagtgaaagacaaatgataccttacccataggaagaaaacaatttcaatgaaagtagatttctcatcagaaactatgaaagccagaagaaagaagcataacattttataagttctaaagaactgtcaacccaggattctataaccagcgaatgaaaaagatgtacatttatatgtatacatataaaatatgtatatatgtatataaatgtatatacatttataggtatacatataaaatatgtatatatgtatataaatgtatatacatttataggtatacatataaaatatgtatatatgtatataaatgtatatacatttataggtatacatataaaatatgtatatatgtatataaatgtatatacaattatatgtatatattatgtatataaccattcaagaatgagagagatgtacattttaaaataattaaaagaggccgggtggggtgactcactcctataatcccagcactttgagaggctgaggcggacagatcacttgcggtcaggagttcgagaccagcctggccaacatggcaaaaccccatctctactaaaaacacaaaaattaggcaggcttggaggctgaggcaggagaattgcctgaacccaggaggcggaagtgcagtgagccaagattgcgccactgcactccagcctgggtaacagagcaagactccatctcaaaaaataaataaaataaaataaaataactaaaagagttattgaattgtaattgcatttggattggaaattggatctaattgtaaattggatccaagagtaactggattgtttgtaatacaaatgataaatgcttaagggaatgagcaccccgttctctatgatgtgattattccacattgcatgcctgtatcgaaacatctcatgtaccccataaatatatacacctactatgtacccataaaaattaaaataaacaaatttttaaaaataaaataaaaaagaattcaggaaaaaccaacacattctcagatgaaggaaaactaagagaatttgttgccagcagacctaccctaaaagaatagagaaagggagttattaaaacagaaaagaatggtaaaagaagggaatctggaacatcaggagaaaagaaagatagagaaggaagaaaagaaaaggagaaagagggagggaggagaggacagaaaaaggggagaggggagaggaaggggttttctttttcttcttgagttttctttccctttttttccagaggatcttcacacctctaactgaattttctaaattacatttaatagttaaagtaaaaattgtaacactgtctgatgtgattctcaatgtatgtaaagaaaatattaagacaataatattataaatgattataaatgggagaagataatggtattaaagggaggtaaggttttttttgttttttttttttttaactgtgtcttgttctgttgcccaggctggagtgcagtggcacgatctcagctcactacaacctctgcttcccgggttcaagagattctcgtgcctcagcctcctaagtagctgggactacaggcacgcgccaccatgcccagctaatttttgtatttttagtagagacggggtttcaccatgttggccaggctggtctggaacctcctggcctcaagtggtccgcctgcctcgatctcccaatgtgctgggattacacgtgtgagccactgtgctgggcctggccctgaggtaaggcttctatattttgtttgaactggtaaaacgtcaaaaccaataggctgtgataaactctatacataatacctacagccattgctaagaagtctatacaaagagacacactcaaaaacattacagataaataaagtgagattctaaaaaaatattgatgtgacccataagtaggcaggaaaaaggaaacagaaaaacaaaaaaccaaaaaacaaacagaagacaaaaaaaatgaattggcagacctaagtcctaacataacaataattacattaaatttaatagcctaaatataccaattaatggatttatatttacagactgtattttttaaatgagccagttaaatgatagccacaacaaaattacttcaaatattatcatacacataggttgaaaaggattaaaaaaaagatatactatgtcaatattaataaaaggaaagcaagaatggttatagtagcatcagataaagaacaaagcaaagataattagcagggacggaaaggaacataatgatagtagagtcgctccaccaaaaagatgtggcaatctcaaatgtgtacacaccaaacaacggaactacagaatatgcgaaggaaaaatggacagaactgaaatgagaaacgcataaactgacaattacagtttgggacatcagcactactctcaactattgttagaacaactagacaaaaaaaaaaatcagcaaggatagaagaattcaacaccaccagcaatcaaggtctaattgacattgacaggacatttaatccaacaacagcgaaatacacattctttccaaacattcacagaacatatactaaaataaaccatgtcctgggctagagaacctcaacaaacttgaaagaattgaaaccatacagggtgttctctgaccacagtggaatccaactagaaataactaacaggaagataagaacaaaatctccagatacttggaagctgaacactacacttttaactaagccacaggtcaaagaaaaagtcttgggggaaaacaaaaatacattgaactgaatgaaaaagaaaacacaacacatcaaattttgtaggatggaactaaagcggtgcttcgagagaagtttatagcacaaaaatgcttacagtagacaagagggaaagtatcaaattggtcatctaagctcccaactcaagatattagggaaaaaaaaaaaaaagaaacccaaatcaaacagaagaaataaaatagcaaatggcaaaaatcaataaaattgaatagagaaaaccaacaaagcaaaaagttggttctggccagtcacggtggctcacacctgtagtcccagctagtcgggaggccgaggcaggaggatcacttaagcctgggaaactgaggctgcagtgagcagtgattgcaccactgcactccagcctgggtaacagagtaagatcccctccccctaaaaaagatggttcttacaaacaatcaaaattgatgaacctctaccattattgagaaagaaaataatgaaattacttatcaccaatttatcagaaaattaatcaccagtgtcaggaaagaaacagtggatatcattacaagccttgctgacaacaaaatgataataaaggattgaaacaaaacagctctacacacataaatttgataatttacataaaaagaactaattcctcaaaaaagcaaaaactactgtgtccggacttggtgggttcttggtctcactgacttcaagaatgtagccgtggaccctcgaggtgagtgtttcggctcttaaggtggcgtgtctggagtctgtcccttctgatgttcagatgtgttcggagtttcttccttctggtgggttcctggtctcgctggctcaggagtaaagctgcagaccttcgcagtgagtgttacagctcttaaggcagcgcgtctggagttgttcgttcctctcggtgggctcgtggtctggcttggctcaggagtgaagctgcagatcttcgcagtgagtgttacagctcataaaagcagcgtagacccagagagtgagcagtagcaagatttattgcaaagagcgaaagaacaaagcttccacagcgtggaagaggacccgagcgggttgcctatgctggttcaggcagcctgcttttattctcttatctggccccacccacatcctgctgattggtagaaccgagtggcctgttttgtcagggcgctgattggtgcgtttacaatccctgagctagatacaaaggttctccacgtccccatcagattagttagatacagagtttccacacacaggttctccaaggccccaccagagcagctagatacagagtgtcaattggtgcactcacaaaccttgagctaaacacagggtgctgattggtgtatttacaatccctgagctagatataaagactctccacgtccccaccagactcaggagcccagctgtcttcacctagtggatctcgcaccggggctgcaggtggagctgcctgccagtcctgcgccgtgcgctcgcattcctcagcccttgggtggtcgatgggactgggcgccgtggagcagggggtggcgctcctcagggaggctcaggcacggcgggctgtaggtcccgagccctgccccgtgggaaggcagccaaggcccggagagaaatcgagcgcagcgccggtgggccagcactgctgggggactcagtacaccctccgcagccactggcccgggtgctaagtcccccattgcccggggccagcagggctggctggctgctccgagtgcggggcccaccaagcccacgcccatccggaactccagctggcccgcaagtgccgcacacagccccggttcccgctcgtgtctctccctccacacctccctgcaagctgagggagtgggctccggccttggccagcccagaaaggggctcccaccctgcggtgggggactgaagggctcctcaaatgccaccaaagtgggagcccaggcaggggaggtgccgagagcaagcgagggctctgaggactgccagcacgctgtcacctctcactaccaccactaacccaatatgaaatagagaatttgaataaccctacaactattaaggaaactggtttttaaattttaaaactcctgaaaaggaaatctccaggcctcaatagtttcacatgagaactaccacttgatccagcaatcccactactgggtatctaccaagaggaaaagaagtcattatacaaagaagacacttgcacacacatgtttatagcagcacaattcccaattgcaaaaatgtggaaccaacccaaatactcatcaatcaatgagtagataaggaaactgtggtatatatatatatatatatatatatatatatatatatatgtatatatatgtatatatatatgtatatatatacgtgtatatatatatatatatatgatggaataatacagagtcataaaaaatgaattaatggcattcacagcaacctgggtgggattgaagactattattctaagtgaaataactcaggaatggaaaaccaaacatcgtatgtcctcattgatatgtgggaactaagctatgaggatgcaaaggcataagaatgatacaatggactttggggactcaggtgggggaaaggtaggaagcggatgagggataaaatactacaaagtgggttcagtatatactgctccggtaatgagtccaccaaaatctcacaaatcaccactaaagaacttatactacctattccccaaaaacctatggaaataaaaaaagataagaaaaaaaagtaaatgtgaaaatataagctacagactaggagaaaatatttgcaaatcataaatctaataaaggacacctatctagactatacaaataactctcaaaactcaacagtaaaaacaaaaccaaacaacaatctatatttttcagtgaaatctctcttcacggtaccgcacagtcatgattactgtagctatataataaatttggaaatcagggagagtgctacctcctactttattctttttttttcagaattgttttagttattcagttcttttcctttgcacacaatcttctcttcatcgaagagcgatttcactgaaaaagatgcacaaatggcagataggcacaggaaaagatatttaatcaacatcattagccattagggaaaagcaaagtaagaccacgataaaacattaactacatacctattacaacgactaaacttgaaaacaatcacagcgacgatatgaaacactgccaaggatgcagggacactgcatctcccacaccttgctgatggagatgtaaaatggtgcagccacttgggaaaatagtttggcaatttctttaaaacactaaacagatacttagcatatgactcagccattgcacccctgagcattatcccaaagaaatagaaactcaagccaggcacggtggctcacgcctgaaatcccagcactttgggaggccgaggcagcagatcacctgaggtcaggagttcaagaccagcctggccaacatgacaaaaccctgtctctactaaaaatacaaaaaattagccaggcatagtcgcaggtgcctgtaatgtcagctactcaggagactgaggcaggagaatcagttgaatccgggaggcggaggttgcagtgagtagagatcgcaccactgcactccagcttgggtgactgagtgagactctgtttcaaaaaaaaaaaaaaaaaaaaaacagatccacacaaaatcctataggtgaatgtttatagtagctttatttgtaatacccaaaaaacaaaaacagccaagttgtctttcaataactgaatgattaaacaaactatagtacgtggaaaagtgttcagtaataaaaaggaacgaactattgatatataactacatttgacccttgaacaacttgggctttaactgtgcaagtccacttataagcagattttcttctgtctctaccacccctgaaacaacaaaactaacccctcctcttcctccttttcctctgcatgaaaacaacggggatgaagaccttcataatgatccacttccacctaatgaatagtaaacatatgttctctttcttatgagtttaatacatttttctagcttactttattgtaagaatacagtatataatacacagaacatgcaaaatatggctttcattcaacaataagctattagtaattaaattttgggggactcaaaaattaatttcaactgggcggagttcagcacccctaatccccgcattgtgcaagtgccaactgtatttgaatggatttcaagggcattatgcatgagtaaaatattgaagtcgctcgcaaaaggtcacatactgtacaatcccatttatataacatccttgaaatgacaaaattatagagatggaaaacaacttggtggctgacaggggttagggatgggggaaaagagggaagtgggcgtgactatgaaaaggtggcaccagggagaactttgtggcaataaaaccgttttgtaacttgattgcagtggcgtttacatgatcatgtgatcaattgaaactacacacacacacattgcaccagtatcattcctgattgtgatgttgaactatagttatataagatgtattcattgggggaaactggatgaaaggcacatgggatctctccatgatacaatttctttgcagcttcctgtgaatctataattacttcaaattttaaaaagaaaagcaaaattaaagattttacaaattaaatctgaaaggaaattaagtgttaataattgcctctttgggaggtggaagtacatgaaatttttctgttttgcatgcaagtattttctataatgaacatatatgttactttgtttttatcacagtaatttaaaaaaaaaaatcttcctcaaaccatggtcatgagaggtctactcagctgcttacatgttcccctccagtgacggcacaggggatggcctctcctaaaacaaccctaggaggatggcctcacagatgagggaagtggggagagcagagcatctcctggctagggacctctgagttatgcagcaagcatcaaccatttgcaacaaaaaaaaccgtgagaaacatacacttattcacaatgctggtaggaatgcaaaattgtatcattgcaatgcagtggggatggggaatatctaacaatttatgtatggatctgcttttcaaaccagttaccctatttctagggagttcacctgaagaagcacctctggcaatatgaaaacacatgtccacgaagttattcattacaacactgtttatcactgcagaatattggaaaccacctacatgcccaagcataggagagtagctgaatgaattatggtacctctacacaatggaatgctgctgtaacaaaagaatgaggaagatctccatggcctgataagaagtgctttgcaggacattctgtcaagcgaaaaaagcaaattgcagaagagcatatagagtatgctatcggttgtgtaagaaggaatgatgaaacatacacatagctatttatctttacacacacacacgaaggataaaccaggaagaaatgaagttggttacccgtaagaggtgagaggaaaataaggtggaaggaatataggagggagtgacccttctctgaaatgtctttataacgaggtttgacttttgaaagcacgttaatattctaaatgttcaaaaaataaaattaaacaggaaaacaaactaaagcaaattaacctaattgtatttcaaatgaatattataattatactgaaggggaaggaaagaaggaaggaaggaaatgtgagagggagggaaacagggaaggagggggtaataaatgaaaggactaactctagtaatttacgtatattttactatatacccatagtctttaacagggttggaggatgggaactgcaaacaaatcctgaattcattttagtagaactgttttttgtagtggtatggctgatgcaattgtaagactatgttaaatatattatactgttataatgtatatagatatatcaaattattatattaagcaaatgagtaaatgtgttaatgttgggagccaggattctcactgtggaagaagggacatgcaaatgggaaaagcaaaaaagaacctggaattaggagtggtggtgtaaatgcatgatttctaaaatatgcataattatgtgcatatatgggcatatgtgtatgtctgtgtgtacacatgcacacatttttctagttctatccactgaaagagcctaaaagcaaagacacacaagtagcacctagctcctagatctttggtctctaataccattccatgctaaaaggaagcagtgctctccagagaaatgacttattcccggagaggagcagaatatgtacaacgtgagccctgaatatcttattatgccagacacagagtgtttttaaaaaatcagcatgtcccaagggagatgaaaagggctcccactagtcaacttcagaataatttaagcacccaaatattaagtacagtaacaagttataaaccatcagaaaatagaaattaatgagtccttactgataatagataataggtagatgatagatagataataggtagatgatgatagatagttttaatttttaaatggggaagtatattctttaaaaatggcaacaccattaaagataaagaaaggctgtagaggccaggcatggtggctcacgcctgtaatcccagcactttgggaggctgaggcgggaggatctcttgaggccagtagattgaaaccaacctgggaaatatagcgagaccacatgtcaatgaaaaataaaattttggctgggcacggtggctcatgcctgtaatcccaacactttgggaggctgaggcaggtggatcacctgaggtcgggagttcaagaccggcctggccaatgtggcaaaaccccgtctctactaaaactacaaaaattagctggacatggtggtgggcacccgcaatcccagctactcaggaggcttaggcaggagaatctcttgaacccaggaggcagaggttgcagtgagccaagatagcaccactacactccagcctgggtgacagagcgagactccatctcaaaaaaaaaaaattatttgaaaaaagaaaacttttacaaattagatgagtgtagtggtgcatgcctgtggtcccagctactcaggaggctgaggcaggaggatctcttgagctcagaagttggaggctgcaatgtgctgtgatcgcaccactgcactccagcccagctgacagagcaagaccctatctctaaattttaaaaaaaaattaaaaagatgaattttaaacaagaaagactgtgggaaagtttcagattaaaagagagtaaagaggacacaaaatccagtatctgactagagactggatcctgtactggatgggggaataggctataaaggattttattgtgccaattgacaaagttggaatatggatgatagagcacataaaagtattttatccctggacatttatgaaggtgataactgtgggtatgtaagagaatatctctgttcttaggaaatacatactgatgtatttaggggtaaagagccatgaagtttgtaatttactatcaaatggagggaaggaaggagagagggagggggagacagaagggggagagagagcacaaatgataaagtaaatgagaacaaatattaacactaggtgaatctgaataaagggcatacgggtgttctttgtactctttatttttgcaacttttttaaatttgaaattatttccaaataaactgtttcaaaatgttattatagaaaaaacaaagtagccctcagaaaatgtttttcccctaaactcccatcaaccacttgggagtgctcacttcccacacccttggcaacattgattagaatcacacttgaaaagttttaacaggcttatgagtaagggactgcctttattactagtgagattgaacatcttttcatatcatgattgaccttttatatttcttcctctgcaaactgattatccaaatctttctcctgtttttttctattgaagtattttttcttattgatttgtagaaactctttatatattgtatatattatacaaggattttatgtgataattacttaaaaggattagcacagggaaggatacagaataattactcagaagaaggatgatttgagcattgttactttaataatgaggtgggggtggtaatatttaaatacttaaatgtaaataacactgtaacgtagtactcaagaacatgggctttagggttaagcagagactgggttcaaatcccagctccatgggtgccactggccatgttgttacgctccctgagcctcagctcccctactcataaatcttatctaaaagttgtaatgaagagcccatgacattctatctgcaaaggatatacaatacttagtacacagaaagcactttctaaatgctattattaattttgctaccagagagcctccctgctgcttcccaagggtaatccttaccagagacaagtagcatagcatgatggcaactgttttcaccagaagagatgagatgcagggtgtagatgccattgtcagatgcacgcacatcaataatgatcagggagccatcagctctgcctgtttccctgccagtgtgggctggtcctagggtgtagccatggctgaagaagttaaaattgaggatccgggtaacctgattggtggttgctcctcggagccaattgtaggagatgagattctgagggatcccctggacagacagggtgacgttgccccctcgacggcccagggagggatggatgtgatcgtcagctgagcagacacctgcttcttgcagaggctcaggaagaaggcaaagggaggaagcaaagagcactatcacagaggccacttagcagcattcgacagtagactcagccactgctagagtctcactcatcggagttaaactgtgggagtgggaagagcatgtgcaaaggccctgaggcaggaggaagatcattgtttttgagggaaaagcagggaagccagtgtggttggagttgagtaagtgaaaatgaaagaggtaagagataaagtcagagaggtaagagagacagatcacacttacaactggcattgacatttttggcaagacaattatgcatcttgtggatccgtcctgtgcattgcaaggagtttttaacaccacttgctctccctactacaacagcagcagctccttccaggcattgagacaaccagagaacattcccacacattgtcaaatacccgctagggggcagtattagctctggtttggaacatcatgcaggctcttgcagataattatacgagtttttttgtttttgttttagtttttgtttttgtttttttgccacagagtctcgctctgtcactcaggctggagtgtgccagcttgatcatggtttactgcaacctccgcctcccgggttcaagtgattgtcgtgcctcagcctcccgagtagctgggaccacaggcatgcgccaccatgcccagctaatgtttatattttttttgtagagtcagggttttgccacgttgaccagactggtcttgaactcctgggctcaagtgatccttgtgccttggcttcccaaagtgctgggattataggcatgagccaccgcaccagcctgtaaggacttttcgttgtattctgagggagtcagagaaccactggagagttttgagttaaagattaacacgatgtaccttatattctgatcattctggctgcagattgcattgattttggagctcaagggtagagttgcaacattgctcagctccacgaagtgagctgccattcacattgtagttaatgcaaatgctacttccagcaactgtgcagtgcacaacccatacagctatatgtggtgaccccaggcaaggcagaagcaggagacaccatttaggaggtgactgcaacaatccaggtgagagatatcagtggggaagaaaatcagaaattatgatccgtaactgttacctgcaagacagagccatgtccaaagcccaccacctctgcagggaccttccaaggggccagccatgtttctttgatgcctcaccagtctagctgtccttctgcctcctcccagctggaggccaggcctaggggaagttcaatagtgtctgaaaagccccgccctctatagggtctttggttttacctcctctcagaagacagcccatcagtactgctccctggatcccactcccattcaccccagattccacactgagagtttggggcagggtccactggcaccagtttgggtcttaccaattctacagattcctccaggctctgccatcacagaaggtccagccccagtgctgctttggccagaaagaatgcttggcactgcatttgctgacaaggagtgtggcctgtgtttatcccagaggtgggtgaggcagcctctgctggttccagaggtcccctctgccacctgaggcgccagccatgcagtgctggtcctaggtggggttacagaggtattgacaccagcctggtctctgggttaatttttgttaagggcctgcgacccagtgtggaggggttgatattgcgcagccttgaaggacgtggacatgagcttatcagaacaagtgatagcaagataaaagatcaaagtaggctctttgcctcagattctgcatggcagcaatttccaccagcagggtccaaagacccaaaatgaacaaggaaagcaacctcctgaagggacacttggtaatcaccttgatctttggttttcaaagtctgcagtccacttggaaagcaaggtacaggggcagagagagttgacaaatatgtactgcttgatgaatatggaagaaacaaagaaaacagaagtttgaaaaccaccgacctagaatttttaaatgacgacacccagtgctagcgatctctggagaacagttttgcaagatgcatccaaaaacatacacatgtacactctctttgaccccaccgttcctcttacatttatcttaagataatcattatagatatgtgaacatatttacttctgggataatcatgacagcattgtttatagcaggaaataaagtggaaacaacatatattctgtctgcagagaaacagaagcaatctattctctctctctgtgtgtatatatacgtgtgtgtgtgtgtgtgtgtgtgtgtgtgtaaaatacaacaacaaaactgttcaccaatgatcaggtgctgtcctgttacatggtgaacgcattttatctttcccacagtcctagaagttagatacaactatcatcatctccatttatcatatggagaagttgagacacagaatcactggcccaaagtcacatggatgataagaggcagaaccaggatttgaacctttgcaggctggatccactgttcatggtccttcccattccactgttttacctctcaaatttggaaacattattctacctgccagttgttcagcagttactatcgccaggcatacactgaattatctcagttaattctcactccatgaagcaggatctcttgctgtccccattttatagatagaaaaactgacgctcagagaagaagagtcatttgttcaagtcatacagttagtaaatgacagagccagttacgctgcaagttacccagatttcaaggataagcggtatgtagtaaaaatacatcatgctatgagaattagagatgttcttctgaagatctgatgtttcatctgtgatctaaaggatgggtcagaattaagtagacaaagacagtgaggaagagtgtaatgactggagctccagcagccattctgaatgacgaactgacttaaggaaggaagctatgtctgatataatggaacagaaacatagaaggagcttgcgtggaacaggaatcaaaagaaattaaagactgtctaagcaaaaactcagttgtatgtaagaaaacccaattccccttgaggaagagaaacagctggagtcctttaaaattaactgcctgtttttctgtctgtggctagtgagccttatcgctccctttcccaggcattgtgaagactctttctctagctgtgcagctgcaaggtcattagacagataatctcaagtcgtaaaacatattattccttgaaaagtaagaaataatgtaatgcatgtcttaactgaataactgtttttaattcttgcttctgtaatacgcttccccctgcacagaactccccccaccccacgaaatgcttaaaaggtagcttgactctttgttcggggctcagtcctttggatgttaatctgactgggtcggtgcacctaaataattaaataattcctcctcaaccccttggtccctctgattccttaattatcccacagcatgggtacctggtgaccatgaagtcaccagaccacactgagatgtctgtatcagttacttatcaccatgtaacaaacctctctaaaacctaggaacttcgagagacagacaaaaatgcacaagacttgttgtggcctgggctcaggactgccactttattatttctacctcattgttttggtcaaagcaagtcatgaggtcaaccaagattcaagggtacaggaaaacaggctccacctgtttgtgggagaagctgtaaagtcacattacaaggtgcttcgatacagagagtagagaatcggagccgtgtctgtgatcaaccaaccacaacttattttacatgagagagaactacactcctttattaactaaaccactgttatttgagtttctattttatgcagctgaaccaaatccccacctgacataaagagtgttgcaaatggagagaagagtgtaagcaaaggcccggtggtgggaggctcatgacacttcaaatcactgaaataagtgagggggtggatttcggggtgagaagataaagtcaggcaactgctgcccaccagcacggtgtttcctgctcttcccaagagagactcacacatttgacaacagttgttacccacgcatcaggtgggttcagacacttggcaggtatcaacccaatgactgcaaccaaagaggatttagcatggggattttattacttgcaacaagtaaagagcacactagggatagttcccaaagcagtaacctctctgagctggggtgccgcggacctattggactgaacaaagtggggcaaacatgggaataaaagacaagagacaaagaagtatatttggaagaaagggtcagggggcaccttgcctctagtggacaagcgccctgagctttacacggccctccatatttattaggcaaaagagatagtgagaaagtggggagtgattgtcgagtaattgtcagtcgggcgtttggttcacagcaggctttcgagattgcatcctttgagcaataggcgctaatattctcagtagataacttcaaggagcccggagcccgggaatgatgtccctcagcaaaccttttggtggcagggcagtgtgagtttgcccacatcctgccttcatgataaacagtttgttatttgatcatatagcctccagcggaatgctgagttggtcacgatccctttggccttttcggctcccaacactgggggcagggtcaggatttttataagcatagggtaaggaggcatgatgtgattggatcttgcaatgaggtgatgccaggaggcatgatctgactggatcctgccatgatggggtgatgccagggcttgatctgattggctcctggatcctgccatgttatgtctgcttcttaattctgtccctgctccttggtccaaatgcttaggttcccctgtggttgcgtacttggttcacctgggcgtgctcagtttatgtgacctgagggtccatggcaacctaaaaacaacttacaactttgttacataaaagttgaaccagattgtactgctacataatcacactgtaactcctggagcaggatctggttcaacctgcatttattaaacacatgatgggtggtggatctaatgctgcaggagttagggatgaaggcggggttccaagtgttaagaatttcctggccgggcgcagtggctcacgcctgtaattccagcactttgggaggtggaggcaggcagatcatgaggtcaggagatcaagaccatcctggctaacacggtgaaaccctgtctctactaaaaatacaaaaaattcgccgggtgtggtggcacggcacgcgcctgtagtcccagctactcaggaggctgaggcaggagagttacttgaacccaggaggtggaggttgcagtgagctgagattgtgccactgcactccagcctgggcaacagagcaagactccgtctcaaaagaaaaaaagaatttccggctgggcgtggtggctcatgcctgtaatcccagcactttgggaggccgaggtgggcggatcacgaggtcaggagttcggaaccaatctgaccaacatggtgaaaccccgtctctactaaaaatacaaaaattagccaggcatggtggtgcatgcctgtaatcccagctactcaggaggctgaggcagcagaatcgcttgaatccaggaggcgtaggttgcggtaagccgagatcgcgccactgcactccagcctgggtgacagagcgagactccgtctcaaaagaaaaaaaaaaaaaaagatgatcatgatggtttagggggttgaatggtggccccctaaaaaaaatatgtccacccaggacctgagaatatggccttatttggaaagggatcctcgtgatgtaattaagttaaagatcttgagatgaagtcatgctggattgtccagctatgccctaaatccaatgacaaagtgttgttataagagagagaagaggaaggccgggcaaggtggctcatgcctgtaatcccagcactttggaaggcagagatgggcagatcacctgaggtcaggagtttgagatcagcctggccaacatggcaaaaccctgtctctactaaaaatacaaaaattagccaggcatggtggcagctgcctgtaatcccagctactcgggaggctgaggcaggagaatcgcttgaacccaggagatggaggttgcagtgaaccgagattgcgccactgcactccagccttgcaacagagtgagactccatctcaaaaaaaaaaaaaaaaaagacagagagagagagaagaggagaagacacggatacacagatacacagaggataaggccatgtgaacactggggcagggactggactgatgcagccatcagctgaataacacctggggccaccagaagctggaagtgtcaagggaggttcctcctagagcctgcagagggagctcggcctatgcacaccttgatttcaacttctgccctctggagcagtgagagaataaaatgctgttgttttaggttaacaagtttgtagtatgaggttggtacaaaagtaattgcggattttgccattacttttgcaccaacctaaataatttgccaaaaccaccgctggaaactagtatggatggtaacagaaacgtgtctgtgggaccagatagtgtaataggctgttcaggaggggaggtgatgagcttcctgtcacttcagggttaaggatggggaccttctcaggaagtcttgttttctaattgagatttcttccccatcagaagcatctcaaacctaaaagacattaggagttgcctctgttacatgtcgaatccacaaaccagtctcttcccttcttacctcccctccttcccaactggtatcttccctgcacacccctccaggcccctcttcctcaaacaccattgtccccaggacttcaatgtctaccctccccttggaaacctttagtaatataaaatcaccaaagcatcttaaaacaataatgcccagtgtgggcaaggatgttcagaaatgggcactctcatgtacatttcatggcaggctacattgccacaataatttcgaagggcaattttatgccatgtatcaagaattaaaatctgacttagctattttattttcaggaattcagcctgagaaaataacctgtgatgtgcaaaataaatttatacacatgacccttcctgatctatccattggccctgtccccagtcctgtcttttgctgatcacttgcttgaacagcacatgccattcagattaaatccacatcatggagaatgtgcactgtttttctttcctctgggctttttacatttgtaaattcctgccctccccttgccaattaactcctgctcttccttccaggataaattcagatgtcacctcctccaagaagcttcttggcctcctgggagcagattgggtacctcctcagggtccctaagtgccctcccttattgctcaaaaggcaatgctatggggtgattaacagggaagattccagagccagtctctgattctaacacctgctttacatggctatgtgactctgtgactctgggcaatttacccacatctctggctattctctctctctctctctctctctctctctctctctctctctctctctctctctccttctctctctctctctctctgtcttttgagacagagtctcactctgttgcccaggctggagtgcagtggtgtgatctcggctcactgcagcctccgccccccaggttcaagtgattctcgtgcctcagcctaccaagtagctggaactatgggtgcacaccaccacactcggctaattttttgtattcttagtagagacaaggttcaccatgttggccagactagtctcgaactcctgacctgaggtgatctgcccacctcagcctcccaaagtgctgggattacaggctcgagccaccatacctggcctgttttctcttaaacacttattaatcgtttgctgtgtgccgggaactgttctgtgtgctttacaaatggcaattcattgaacctcccaacaaccctgtgaggcaggggttagagctacccattttgcagatgaggagactgaggccttgagagtttaaatggcttgttgaagttcacacagtgcaaattgcagagccaaatctgaatccatggcatcggcgactatacggtgctgcctctgggcctccatcctcatctggaaaatggggcccatagtaacagtgtcatatcgtttggatgtttgtcccctccaaatctcatgttgaaatgtgatccccaatgatggatgtgggcctagtgggaggtttttgggtcatggggcaatccctcatgaggctttggcgccatctttgcggtaatgaaggcattcacgctctgttcattcatgcaaaagctggttgtttaaaagaacctggcaggccgggtgcagtgacttatgcctgtaatcccagcactttgggaggctggagcaggagaatcacttgagcccaggagttcgagaccagcctgagcaacatggtgaaaccctgtctctacaaaaattaggcaggcatggtggcatacacatgtagtcccagctacttgggaggctgaggcaggaggatcacctgagcctgggaggcagaggttgcagtgagccaagcctgcaccactgcactccagcctgggtgacagagtgagaccctatctcaaaaaaataataataaataataaaaaaataaaggctgggcacagtggctcatgcctataatcccagcactttgggaggccaaggtgggcagatcacctgaggtgatcaagaccagcctagccaacatggtgaaaccccatctctactaaaaatacaaaaaagtagtttggcctggtggtgggcacctgtaatcctggctacttgggcggctgaggcagaagaatcactcgaaccggggaggcagaggttgcagcgagccgagattgtgccatcacactccaccctaggcaacaagagtgaaattccatctcaaaaaaaaaaagagcctggtatctctcttgcctctctttcactaggtgatactcagcttccccttcaccttctgccatgatgataggcttcctgaagcctcattatgagctgagcagatgctgccatgcttgtacagtctgcagaaccatgagcctaataaacctcttttctttgtaaattacccagccttaggttttcctttatagcaatgcaaagcagattaattcacagtgcccccttgtagaggagctgagaggactagactgtttatgtcaagctcctggagcagggcctggcccatcctcagtgctcggtaagtatcagagagtatcatcagttacgggactatcctattttcctaccttctttatcgtttcatcatttctgttcatcatcgcctaaagcctcctgcctactattttccaggctctcaaaatggggtttctttgattttcatagcagcccgaaggggaagtacaatcattgccccattttgcaaataaggaaattaatcagagaggtcaagtgacttacctcagatcacacagatgacagaggtggagcaagaaattaatttggcttgtcctactcaaagattccctgccctgcaacttcccctttaagacatgattgtttaatagagtgagtctgggacaatgcacatttgtcaggtacgcaggctctgggaagctggaaatgggaccagccaagactagagctctgatataacctctgagaaatgccctccccaacctcagttctcagccacaccctcacctacgagcaacgctcccatccagggctcaccccagccatggggagcaaccaggaaccgggccatgggtcctttaggagtgcttcctcctagaaggacattggtttgcggagaacagactgcaagaaccccagagtgagccgatttgtgtgtcctgcccggagccctagcccagagaggagatggcccagccttctgtccccatgatgagggccgtgcccatggggcattggtggccagccagggagggactggcacagccctcttcggtttacaactgttcaatgtctcattaacttctcctctttggtcatgtctctggcccagcattcgtgccctttgctcttcccaatcatcctcatggtaggcaaacgtgggagggcaggggactgcatgctcccctcctggcttcctgctgtataaatggggaaacagaggccccaggagagcaagtgatccccccaggaccatacaaggagtctgaaatctggccctgactggattccagtctttggctcaagcctcagccagaagtctcatcctgcatatctggcccagtctgaagactcaggtgggagacaggaaatgaaaatcttcaggagcttcagggaggctcattggaaagaaaaggaaacttgtatttactgagaaaccagctttgccgatgcaacagcaaatcctgagctcagcgttcaaatttctccagaatccaaccacttctcaccagctccacccacaccagcaccatctcccacatggaccattgcagtagcctcctcactgggctccctgctcctgccctcctgctaacacctaagttgtctcatgtcccttgcctgctcagaggcttcctgtggcttctgtctcactcaggaaaatgcctaagtcccaacactggcctgcaaggtccatggtctggccccatccctgccccacccttatctcccgcttcctcccttactccccgctctccagccacactggcctctccactgttcatcaacactcagggcacagtcctgccccagggcctttgcatttgctttactttctgccccaaacactcttcccaagatagccacatggctttttccttcaccacagtcaggaccctgttcagatgtcacctcttcagagaggccttccctggctgtcctgtgtacagcctagcacttcctgtcccacctgtctggtttatttctttccaacacactcatcgccgtgtgacactctccactgatttgtgtttgttgattgctctccctaatatcagtcccttaaaggcagggatttctacctggttttttttattctattttatttttttagagatgaggtcttgctatattgcccaagctggtcctaaactcctgggctcaagcgatcctcccacgttagcctcccaagtaggtgattctacaggtgcaagtgactgtacctggcccctctgcctgttttgttcactcttgtaaatgcccaaagcctagcgcagtgcctggcacatggtaggtgttcaataaatattttgtgaatgaatgtgtgagaccctgcactgagcagttgaatccaaattaagtgcaagtttccatccccatggccatcaggctagaacagagaggctcaaaaagccccccagccacacaccctataaggggaggagttggtatttggacccacatctaatgccaaagcctgcattcttaaccactgcattacactgctcctggatttagggattttactgatgagacccacagaaagtgtaatagccatccccactgatgcccctcccttagttaacgaagaaatctcaaagataagaatcaaagggccaggcggggtggctcatgtctgtaatcccagcactatgggaggctgaggtgggtggatcacctgaggtcaggagtttgagacccagcctggccaatatggtgaaatcctgtctctactaaaaatacaaaaattagtattggcatgcctgtaatcccagctacttgggaggctgaggcaggagaattgcttgaagtggaggttgcaatgagccaagattgcaccactgcactccagcctgagtgacaagagcaaagctccatctcaaaaagaagaaggagaaggaggagaaggagaaggaggagaaggagaaggaggagaaggagaaggagaaggaggagaaggagaaggagaaggggaaagggaaggggaagaggaggaggaggaagaaggagaaggaggggaaggggaagaggaggacgaggaagaaggagaaggaggggaaggggaagaagaagagtaaggggaaggggaggaggaggaggaagaaggagaaggagcggaaggggaaggggaagaagaagaggaagaggaagaagaagacgaggaagaggaggaggaggacggaaaagaagaagaaaaaagaagaagaaggaggaggaggaggaggaagaaagaagaaagaagaaaagaagatgatataggaaggatataaggacccagagcaagcccaggcacaagcagatgccttgaatattcttcccaactctgagctgagacgtcgtccccgcttggccgagggcagctctgccccctgttggtcactcatggcaacggccccattggtgtcccaggacaacagcgttgacaaggataacccaactggcaagtgctcaaaatccctaatatacacagagttcctgaaaagcaacaggaaaaaaagagacaatgcattttttcttttagatatagggtcttgctttgtcacccaggctggagtgcaatggcatgatcatgtctcaccacagcctagatctcctgggctcaagtgatcctccagctacagcctcccaggtagctgggactacaggcctgtgccaccatgctgggctaatttttaaaactttttgtagaaatgaggtctcactatgttgtccaggttggtctcaaactcctaggctcaagcaattctcctgccttagcatcccaaagtgctgggattcaacacaattttttaattggcaaagtacatgaataggcaactcacagaggacatcatcttcaaatgactatcaaacttaagaagagataggcagcttcactagcgatggaaatgtattttaaaaccaccttgggatacgaatgtttatatgtacatggagcaaaaaaaaagtgaaatattaattatatccagcaacaggaaagagaactgttgtaaacactgttcaagtatttggtggccattcactggcactggcttgtacccctgctgagcttgggggacaaggagccacagtgcggagctttgggcgtcccagtccacacttctgcctctgcactctcttattcccgtgtgtgtgtatccctctgttgtaacaccctagctctcagcaagtgacaggaaagagtctaaaaggcaaagttagggacaggacaggaccctgcacctgtgttaatcacaccccttcaccctccaacagggcagaagcaactctcaatgctatactgcctgtcctagctttggctgccgttttttttgttttgtttttgtttttgtttttgtttttgttttttgaggcggagtcttgctctgttgcccaggctggagtgcaatggctcgatcttggctcactgcaacctctgcctcctggggtcaagcagttctcctacctcagcctcccgagtagctgggactacaggcgcctgccaccatacccagctaatttttgtatttttagtagagatggggtttcaccatgctggccaggctgatcccaaactcctgacctcatgatctgcccaccttggcctcccaaagtgctgggattacaggcatgagccacagcgcccaggctgactgctgttttttaggctccctgtggtggtggggagtgtaggggttggtcaggtaatgctaatggaaaagaagggcagaccccaaatctctccccacccgtggcaccagtctttctacaatgggaatgctcccacccacgacttcaccctcatccagaacccaaccaccttctgttgcctcattagtcctgcttccagcttctgaggcatctccagggctagtgcaggggaaagagccagcagaaaggcctggactgccgtgatgcattttaccttgtttgtagacatggactgaaaagctgcaagaccagcaattataaatgagaataccagctaacctgtgagtggttactctgtaccaggcactttgctaggcatgccacatacatgatctcctttaataacataacccatgataacccatgataggccaggtgcggtggctcatggctgtaatcctagcactttgggaggctgaggtgggtggatcacctgaggtcgggagttcaagaccagcctggccaacatggcaaaaccccatctctactaaaaatacaaaaaattagccaggtgtggtggcaggcacctgtaatcccagctactctggaggctgaggcaggagaatcgcttgaacccaggaggcggaggttgcagtgagccaagatcacaccagtgcactccagcctgggtgacagagcaagactctgtctcaaaaaaaataaaataaagtgaagtaacataacccatgaaaaacctatatcgtaatctctgttttacaaaagaagaaacagatgctcagcgaggtatagtaatttgccaaatgtcactctgctagaaaatagctgagccagaattcaaacccagagcttgtactttgaagcatttccaatttgctctttgaaccaatttggaggctttcatttctggaagccaggctgttgacagctttcacttcttatactttttcccacctagaaaggtctggctgggtgcagaccaaatatgattctggtgtcaatttgaacagactgaactcaagtccacatggacccttcaggatggtccaactgggagaagccctgagggtcacacagaagggcctctccaccttcaacaagtctcctgaggatgagggcagtgcacttaccactcagcaaagccacacatgcatcctcattagaggggcaccctctctgctggagaaccggcaagtctcaaaattggggcttagtccaggagggttcttgcctttgcccaggaaagaattcaagggtgagctggtggcgttagacagcaatcttttattgcacagtactgctccttgcagagcagggctatctcataggtaatgtgctcagagcaggcaaggtagggactgttgccaactgtatttatacccacttataccaactttcacttacatgcaaattaaggggtaggtcaatgcaaatcgagaggtgggtcatttagaattttctaggaaaatggtggtaaattccgggtgatttccacacatttgtaaactgtcatggctctggtgagaatgtcttgtgctaatgcacaatgagggcagctaaggattgcttttgttgccatctgctggttcctgccagttttttcattctgtcccttcaggactgagaaataagtcctgccaacctatctcctacctcatcttttcctcagcccagtcggggatggtgggtgactaagaaccagactggttggaaaaacatgctgtgatttaaacctgtaatctcattctggatttttatagcagacaagccagttggacatgcccagtctttttgccataaaaccccaatgtgcaagggagaccagaccaactccattctagctgaggagcccctggctgggctgcctctggtccatattttgcatctccttatatcaagtctgagcattgtcttccaacccacggagttcttgaatgatggagcccagcctcttgatgggtattggcactcaagctgggctcctgggaaccccacatggccgcacccctctcccatgatgggggagaatctcctccctggaccctccctctgggggcatcagaatctctggggcagcaacagggctggaagagaagcctggacttctccagaaactgtgtctgtatggccagcacatgttttcacttcccatgggtatttatatgagtgaagggcagatatagagtattaagagaataaggatcctaaaagcctccttggagtcaccaaggtcctccacagtccctacaacctttaactcctcagctcccctcacccagggaaattccagtcaaatagactgaaccacacaagtggccaaataatttcagggaagtttaaacccctttcagatgcgctagttgatcatatcttgccagttatcctcaagctccccaagccttccagccacctccaataacttcatagaaaccactggttgctaatgatcacggagtcctggactcctttgaaaatgcattgaaagttgtgtgatcctggactgaagcttcaggcccttcctcagaatatgcagatgtatgcacaatgcttcacacaatgtcagggatcctttccaaggaaatttacacccagacatatcatcatccaactgtggaaaatcaaacacaaagaaaaatctcgaaagcatccagagaaaactaaacacatcacttataccaaaacaacaattcagatgatggcagatttctcatcaggaaccatagtggccagaagaaagtggcactttttttttaagtgaaagcaaatttattaagaaagaaaaggaataggccaggtgcagtggctcatgcctgtaatcccagcactttgggaggccaaggcagtggctcacgcttgtaatcccagcactttgggaggccaaggcttgaggccaggagtttgagagcagcctgggtaacatggggaaaccttgtctctacaaaaaatacaaaaattagctgagcatggtggtgcatgcctgtaatcccagacacttgggaggctaaggcatgagaatcaggaggcagaggttgcagcgagtcaagatttgccactgtactccagcctgggccacagagcaagactgtctcaaaaaagaaagaagaaagaaagagaggaagaaaggaaaaaagaaaagaaagaaagaaagaaagagagaaacgaagaaagagagagaaagagaaagaaagaaagaaagaaagaaagaaagaaagaaagaaagaaagaaagaaagaaagaaagaaagaaaagaaagaaagaaagaaagaaaggaaggaaggaaggaaggaaggagggaaggaaggagggaaggaaggagggaaggaaggagagagagagaaagaaagaaagaaaagaaagagaaagaagaaagaggaagagagagaaagaaagaaagaaagaaaggaaggaaggagggaaggaaggagagagagaaagaaagaaagaaaagaaagaaagagaaagaagaaagagaaagaaagagagaaaaggaataaaagaatggctactctataggcagagcaatggcatgggctgctcaactgagtacacttacagttacttcttgattatatgccaaacaaagggtggattattcatgaattttcctggaaaggggtgggcaattcctggaactgagggttcctcccctttttagaccatataaggtaagtgctagatgttgccatggcatttctaaactgtcatggtgcttgtgggcatatcttttagcatgctaatgtattataattagcacataaggagcaatgagcatgaccagaggtcacttttgtcgccatcttggttttggtgggtttggctggcttctttaccacatcctgtttcatcagcaaagtctttatgacctgtatcttggtggcacattttttaagtgctgaaaggaaaacaactgtcaacccagaattctgaatcaagtgaaagcattctttaggtttaggagtgaaggtgaacattgaggttagctcggtttcaccttgaatatgtcttaaatcccctatgcatgcagtgaatgtggttttatacataaaatgttgtacagcagtagctgtatgcatacttacagtgtgtacagagatgctcagtacccaacaggacaaatctgcaaaatacagcttcaccattgagccatagatggagctgctgcctcaaattagagctgtatttccacctgtttctatagttaaaatttcataaattaaatgtgtgtatgatgcaagtctactgcaattcctttactagagagaagttgcaagaaccaatgatccctgtttctttatattcatgccctcatctaattccttccccctgagtgtgggctgtacctagtgactcatttctaatgaatgaagtacagcagaaagtgatggctgtcacttctcagattgggttacaaaatggctgttgcttctattttcaacttctctctcactctgtcttgaatcactttctgaggggaaagctacctgccagtagcaaacaccatctgagtgagcttgggagcagaacaatcaccccataccctcatcccaagttgagcttttgaatgacactgcagcccccgtccagtagcttgatcgcatcagagggaaaagacctggctaagctgagcccagattcttgactcaaagagactatgagataacaaatgttttattgtcttaagccactacattttggagtaattagtcatacatcaataaataactaatgcaggtggccttctgggacacagaggaggatggagaaggttgaatatcagagagcagatcttggggacaaaaacacagagtcctcatcacaggttatcatgcgagcccagaaaacaagcatctaacatctcatcaataatatgttcccacacaccaccaatacttttaccaaaaaaagtactaatagctaatatttcagtttgtattttctaaaattgactccatatggctttcctttggtggaaaaggaaaaagaaaatttgtctctgtcattaacttaatgtgatgtgtcaaattttattttattttattttatttattttttggagcagggtctcactctgtcacccaggctggagtgcagtggtgcaatctcagctcactgcaacttctgcctcctgggttcaagcaattctcatgcctcaccctcctgagtagctgagattacaggcacacaccaccatgcccaggtcattttttttgtattttcagtagagacagggttttaccatgttggccaggctcgtctcaaactcctgacctcaaatgatccacccacctcagcctcccaaagtgctgggattacaggcatgagccaccacgcctggccaatgtgtcaaattttagatgaggacacagagaacaggacagaggacctgaactttaataatcattctcatatcaaatatggaaaccacgttgttacggtttaaatgcttgtctccttcaaaattcatgttgaaacttaataggcaatgtggcagtatagaaaggtgggacctttagggggcgattgggtcatgcaggttctgctctgatgaatggattaatccattcatgggttaatgggttaatgaattaataggttattatgagagtggcattagtagcctataagaagaggaagagagacctgagctagcatggccccttgtcatgtgatgccctgcactctatagactgcagagagtccacaccagcaagaaggctctcacgagatgtggccccttaaccttggacttctcagcttccatgactgtaagaaataagttccttttctttataaattacacagtttcagatattatgttataagcaacaattagaaaatctttaaatccacctgggacctggaagccccctctgcggcttcaagatgtcctgcctttctgagctaaaccaatgtataccttacatgtatcaatttatgtctttgcctataatttctgtctccctaaaatgtataaaactaagctataacccaaccacctgggcacgtgttctcaagacttcctgaggctgtgtcatggatcatgatccttaaccatggcaaaataaaattctaaattgattgagacctgtcttagatactttttggtttgcagctgcaaccaaatgtcagccagagttgctgtctcatctgaggctcaactcgggaaggatctgcttggaaaccagggcgttggtaagggagtagaccacccttcatattgtcttatgtccaatttctccctccaaagaaagaagaagtaaaaactaaaaggcagaaatgaaatccacaggcagacagcccggcaccacaccctgggcctggtagttaaagatcgacccctgacctaaccagttatgttatctacagattccagacattgtatggaaaagcattgtgaaaatccctgtcctgttctgttctgttctgattaccggtacatgcagcccccagtcacataccccctgcttactcaatcgatcacaactctctcacacggacctccttggagttgtaagcccttaaaagggacaggaattgctcattaggggagctcagtttttggagacgtgagtcttgccaaagctactggctgaataaagcccttccttctttaagtcagtgtctgaggggttttgtctgtagcttgttctgctacattggcagcattcaattgctaactggttgtaggactgaggatctccatttcttgctggattttgcccacatgggcctcccaacatgaccacttgtttcctcaaagccagcaagggagagagtctcctggaaagatgactctatgttacagaattgccagaggtgttcagaccagagcaactaacacaggagacagaaattatttaggcagatagtgagggcaaaagagctctcagcagaacttcccttctaacaaaaagtagcccaagaaatcatttttcctaacaaagagcagcctgaaaaattgggctgcaaacataaataaggaagctagaagcttgcatgggggagagccagcagctgcaccaatagaaaagggctacctgggaggggaacatcacatactcggacctgtcaggaggtggggggatggcggggagagcattaggacaaatacctaatgtatgcggggcttaaaacctagatgacgggttgataggtacagcaaatcaccatggcacatgtatacctatgtaacaaacctgcatgttctgcactgtcatgcacgtccatgtgaagtgaccaccaaacaggctttgtgtgagcaataaagctttttaatcagctgggtgcaggcagactgaatccaaaaaaggagtcagtaaagggagataggggtggggcatgtttataggatttgggtacatagtggaaaattatagttaaaggggattgttctcttgcgggcaggggtgggggtcacaaggtgctcggtggggagctccagagactaattgtccaggagaaggaatatcacaaggtaatgtcatcagttaaggcaggaaccggccattttcacttattttgtggttcttcagttgccttaggccatctggatgtatacatgcaggcttgggctcagaggcctgatgtgcacatgtatcccagaacttaaagtaaaataaaaataaaaatagattctaaaaaagaaagaaaagggctacctgcggggcaggcatgtccaccatgaaagctcaatcttcccttttttgttagcaagtatacagtaagaaagaaatggataacattgtgcagctcaggctgaaaacccacctgcataataagactggggtgggggctgccagaaattcatgccctgtgcaaatggaacacctggtcctaaccagtttcttacaccctatgtagagcaggtactgcctccccaccagctcatctataaaaacccctgcatttcaccatggaccagcaacctatttttctgggaccccctctctgtaacagacagctattctctctcttttgcctattaaacttctgctgtcaacctcactcttttctttccccccaggggaaagtgtaaacgcagtcacccactaccacaaattatgcagtaacctcactctttgtgtgtccgtgtcccagttctccatggccgtgagacaacaaacctcaggtgtcacctcagaaatgaggccatttcacaacttcatcttgtacaggagctgggtaaaatagggctgacacttcctgggctgcattcccaagaggttaggcattcatagtcacaggatgagataggaggccagcacgagataggaggccagcacaagataggaggcaagcacaggtcacaaacaccttgctgataaaatgaaatgtggtaaagaagccagccaaaaccgagatggtgacaggactgacctctggtagtcctcactactctaattataacacattattagcatgctaaaagacactcccaccagcatcattacagtttacaaatgccatgacaatgtccacaagttatcctatgtggtctaaaaaggggaagaaccctcagttccaggaaatccctgcccctttcctgaaatactcatgaatgacccacaccttgcttagcatataatcaaagagtaactgtaaatgtactcagccgagtagcccatgccactgctgtgcctatggagtagctactctttattcctttacgttcttaaaaaacttgctttcactttattctatgaaaaaaataggctgggtgcagtggctcatgcctgtaatcccaggactttgggaggctgaagcaggcgaatcacttgaggtcagaagtttgagaccagactggccaacatagtgaaaccccatctccactaaaaatacaataaattagccaggcgtggttgtgcgcgcctgttgtcccagctacttgggaggctgaggcaggagaattgcttgaacccggaaggcggaggatgcaatgagctgagatcgtgccactgcactccagcctgggcgatagagtgagacactgtcacacacaaaaaaataaaaataaaaataaaaataaatgtatggactgctttgacgagtggaagaagttgggagtaatgccctcaactactctagtgaggtcataagacaaaaataaaataaataaaaatataaaataataaaatagaaataaatgtaaaataaaataaatacaaatataaaataaatgtataataaaataaatacaaatataaaataaatgtaaaataaaataaatacaaatataaaataaatgtaaaataaaataaaaatgaataaagtaaattaaaataaaaataaattattttattttatatgttgaaataaaaaggttttatatgttgaaatcctaatgcccaaggtgatggtattaggagatgaggcttgggtcagtgatgagatcatgagggaggagctctcataatgggattggtgccctcttataaaagagaccccagggagaccctcatcccttctgccatgtaagatccatccagtgcaccgagaactggggtgcttcaaaatgagcaaggatcgtgttggttctcagagccagatttggctccagcccctttagcattggtcctttgcctgctgagttccctcaaccaggcttgcctttccttctgttctgcactccccacccactcctgctggctggaactcagctgagccttcatagctgaacaacgagtgaatgaatgaatgaacaattgaagacccagcttcctgcttcaagcaggaagtcacccccagaacactgggctttcccatcttctggcccagatagcatcagtcttatctcctttactgaccataaatttctgtggggaaaagcaagagagatcagattgttactgtgtctgtgtagaaagaagtagacataggagactccattttgttatgtactaagaaaaattcttctgccttgagattctgttaatctataactttacccccaaccctgtgctctctgaaacatgtgctctgtcaactcagagttaaatggattaagggcggtgcaagatgtgctttgttaaacagatgcttgaaggcagcatgctccttaagagtcatcaccactccctaatctcaagtacccagggacacaaaaactgcggaaggccgcagggacctctgcctaggaaagccaggtattgtccaaggtttctccccatgtgatagtctgaaatatggcctcgtgggaagggaaagacctgaccgtcccccagcccgacacccgtaaagggtctgtgctgaggagaattagtaaaagaggaaggaatgcctcttgcagttgagacaagaggaaggcatctgtctcctgcctgtccctgggcaatggaatgtctcggtataaaacccgattgtatgctccatctactgagatagggaaaaaccgccttagggctggaggtgggacctgcgggcagcaatactgctttgtaaagcattgagatgtttatatgtatgcatatctaaaagcacagcacttaatcctttacattgtctatgatgcaaagacctttgttcacgtgtttgtctgctgaccctctccccacaattgtcttgtgaccctgacacatccccctcttcgagaaacacccacagatgatcaataaatactaagggaactcagaggctggcgggatcctccatatgctgaacgctggttccccgggtccccttatttctttctctatactttgtctctgtgtctttttctttcctaagtctctcgttccaccttacgagaaacacccacaggtgtggaggggcaacccacccctacaatttcccaagcacaaacacgaggcctgacacatgtggacgtccccctctgcgtccccctcttattgaatttattttctgtgccagggactttacacgccatgtgtcactgagtgctcacaatgacacagtgaggtagaagttatcgtcatccttccacagaggaagaaagaggatcgtgtgcacaaagtcacctgcccaagacagttggaaggacaatgcaggtgtaagcctaggacattgatgtggagccccagaagaacatgtattctggccgggcacggtggctcatgcctctaatcccagcgctttgggaggctgaggagggtggatcacctgaggtcaggagttcgagaccagcctggccaacatgatgaaaccccgtctctactgaaaatacaaaaaaattagctgggcatggtggtgggcacctataatcctagctaatcaggaggctgaggcaggagaattgcttgaacccgggagacagatgttgcagtgagccgagatctcgccactgcactccagcctgggcaacaagagtgaaattccacctcaaaaaaaatattctataggcttatatataagcctatagaataggacagcttcactgtgtgctttttttgcagtgtgaaaaacatgctttcatgaagggattgactaagggatgtggagcagaggaaggaggaatgaggtgcgcctgggggtaggggcacttttagaagaggtcatagttaggggccagggacgggagagtgatcaccaggaaagaaaggaaagggagctgcctttgcgggcagccaggaggacttgagtggggcttaggaggaaggcagcactgggatatttgtttggccgacccattcaacagctattcccagacccgatggctcaggcttgtaatcccagcaatcagggaggctgaggcaggaggatcgcttcaggccaagacttccggaccagcctgaacaacaaaacaagatggtgtcttgttctgtcacccaagctggagtgtactggcatgatctctgctcactgcaacctccacctcccaggttcaagagattctcctgcctcgcctctgagtagctgggattacaggcacatgtcaccaagcctggctaatttttgtatttttagtagagacagtgtttcaccattttggccaggctggtctcgacctcccagcttcaagtgatctgcctgcctcagcctcccaaagtcctgggataacaagcgtgagccactgtgccccacctcaaaaattcttttaaaataggctaagtgtggtggcgcacacctgtggtcttgggaggctgaggtaggagtatctcttgagcccaggagtttgaggttacaatgaagtgattgctccactgcactccaacctgggtgacagagcaagactatgcctcaaaaaaaaaaaaaaaaaattaacgaacactcctgccagttggaactcagctgagccttcatagttgaatgttgaatgaaagaattaatgaattaatgaagccaggcactgtgctgggtgctggagatgtggcagggtgcaggaccaagtccctgcccttgaggaactgacgtccagctgggagacagccaatgaacaaggcaaatgggtaaattacagggtctgtctgaggatggtcaatgccatggagaaggcaggaacggggaagggagatgagaaatgttacaatgctaggaggttggaggaggagatgcttgagcagacctggaggaggtgagggaagaagccagggcagatccgggagaggaccatctagacgggagggcgtcccagggcagaggtccacttggagctggagggtagcctggctgtgtgaggaacagggatagagggtgtggctggaggaaagtgagtgaggggagagggtaaaaagagagggcggagaactgcagggcgggagggggcgggtgtggattagacagtcactgtggactttggctttgactcagcctgagactggagcctttgagcagagaaggggcgagatatgatttaggctgtttgtttgtttgcctgtttttgagatagtgtctcactctgtcacccaggccggagtgtagtggcaggatcacagtattggctcaagcagcttcaacctcccagactcaggtgatcctcccacctcagcctgccaggtgtgcgcctgtagaaaatatctgcaaatcatattttttttctttctttctttcgttctttctctctttctttcttcctttctctctctctctttctttcttctttctctttctttttcttcctatctatctctctctttctttctttacttctttccttctttctttttcttttgagaaagggtcttgctctgtcacccaggctggggggcagtggtgcaatcacagctcactacagccttaaactcctgggctcaaacaatcctcccacctcagcctcccgagtagctgggaccacaggtgcgtgctgccccatgcctggctaattttttagatttttgtgaagatgagttctcactacgttgcttaggctggtctcaaactcctgggctcaagaaattctcccaactcagccccacaaagtgctgggattacagatgtgggtcaccatgcccagctgcacatcatatttctgataagagattgatatccagaatatatagaaaacttccagaatacaactattttaaaaaaaatccaatttttttaatgggcaaaaagaacttgaatagacatttctccaaagaacataataaatggccaataagtacatgaaaagatactgaactatccctaatcattagcggaagacacatctaaactacaatgagatattgcctcgcagctattagaatggctaccatcacaaaaacgaaaataacaaggattggcaaggatgtggagcagcaaacaaggaaaccttgtgtgctgttggtgggaacgcaacctagtatggctgttgtagaagacagtatggtggctcctcaaaaaattaaaaatagaggttgggtgtggtggctcatgcctgtaatcccagcactttgggaggcactttgagagagagagggacaatgagagagagaggtccctgaggggatttgaacctctggttctgggtgtctctgtgctctcctgtcttggaactcatttataacaaatttccctttgtgtgtaaactgcctcaagttggactcctgccatatagacccaaaagaaccttaagagctacacctgccctgacaggatgcatcctgcattcctcctcccagagagagcattttgtcaagactagcttcagctgcaagtaacagaaaaccccaaaatcaaatggcctcaacaagatggaagtttctctttgacataaatggagtctggaggtagagagttcagggcaaatgtggcagtttcataatcctggggacacagcctccttcaattattactggcctgtcatcttcagtacataacttggggtccaagatggctgccagagctccagccatcatatccacattctgttcagtagtgaaaggattaggaacaaaagctatctttaaggccagctcctagtagcctcatataacacttctacttctatctattggccaaaagtcagccacatggccacacttagctccagggaacctagagaatatattttttgctggactcccatgcatccatttaaaaatcagggtatgtattaccaaggacatagaggatgtggacatcagaagcatctcttccaaaaccttcttccttctgtagagatggtgggcatcctaaaccttcagcccctgagggtctctaaactgaaaagtttcctgacagacatttggagaactgattccaccaaaaactatccacagtgggccagtggatgtcactaacctggagcagatggcaacctggggaacaggcccaaggccaagcagccattaatcgccttttggagcccagccagaagaaactcttgataagaatcctagccccagccaggacaaggtccctgccctgcccagctgggagccaatgtgaatcaacaatccactcttcctgtgtggcagccagagggagtgtttacctggtgatcttcaggaactgtaaatggggtgagttccgatcttcttcacctccccaacccagagatgaaggatccagtcttgcacccccatctagacgagcccttatcttaccattgtcctcacccaaaatacacacctccacgaccaggggacaccattcacacagagcacaataaatggctcccaccaaggtgggcaaggcactggtcctgattctggtccacagccacctgggatgagaaggggatgtaagaactagattgagtggggtatcccccgctgtatccacttccagagaagggcagggcaaggtggagcaggatgagatagaacaataacaatagcttctatatatcattcacacaagatagattactcttgttacagcccaaatgacagggtcattgtagacaagcaacaggaagaatttggtggcaaatggcggacagtctaggagaagagcagagggcaacctggcccaggtagcacataactattctctcaggcatacctgttagggtcctgaccagctctctagatgagtgagaattgggagttgggagcagaaaccgttgggtattctttggacagttggagaaaagggaaagaagaatgggcatgggaccttgttctggccaatgcctagtgagaagaagtctgctgggggctgatgggagagattttattggatcttgaagagaactaggagcagcaattccccttttgtgtctctggatgcggctggccaccatcttggactgggagggaagtcaccatgagaggacaacctgttgaggctggggtaggaagatgaagaacctggatctttggtgttattactgagccattgtattaaccaaccgaggaactgccctttcattggaatccctgctacataagataatacacgtcagtgttttaaaccactttgaattgagttatccactttgtatggccaaaagcatccaaagtcatgtttgaggggctggttttctcgtctaaacacagccccggctcagttaagcataggatgggatgaggaacaggaacacaggaggcaaggaggaatgtccctgaaaatgtttgtaaatgtggggtcgacaccaagaggcagaggggaaactcaattaaaacttaaagactgcaagttgtcaccattgtagacgtctcagctttgcaagaagtcaagaattttccaaatgccactcttcaagagacaattgggcagatgtggatattattccaagatatgggaaaacctaatgtcaccattaacctttgaatgagatacagctgaaagtgacagattcttgagtccaaatgactggcccagattctcaggcgtcctagcacagcacaaccgaagttggcacttttctttcctactttgtttattcatcttggggatgcaaaacgctgcatgcatcatcttctatttattagtaatcctgttactcctatttctttcccatgttgtcacatttttaccgtattagagctgctgctttgttctcctctcaataccaaaaaatgtgattacaagattttgccttgaaactctgggctgttgtaactcctggaaataaaaatctcagcagcataaaaaggagaaaatcattctctcttctgcaactatagaaaagcagacactctttccctcataaaaccttccttgtaaatgtggttctcacaaaggagtcctataagacacccagacttcagagactgctcttgctgcatcctgcaagagccacctctaacttcccaaagctgggctgattgtcttcatttctaatttgttattcctggtaatgacactcctttttcctaaaaagtacaaagaattatgagttttcattggccattctcccttcccctaccctcatagagctaaaaagaccacccaggactctgctagaaatttttattaaaacatatagataatgtaatagtcttgtctcatttaaatgaatattttccttcatgctgatatatggatggtggctgaaaacagcaagatgagaaaattgctttcatttggaatactattgcacttgtgtttcctaagatatttcaggggtcagtctggtgttaggacattcatgtgcttctgatttgattgaagattgaattaacttaaattcttttttttgttgttttttactttttttatttttttaaagacagggtctcactctgtctcctgggaatggctgggactggagtgcagtgacaggaaccgtaactcacggcagcccggaactcatgggctaaagcaatcctcccacctcagcctcctggtagctggaactacaggcactagctaactgcctagctaactttttaaaaaaatagatggagtctcactatgttgcccaggctggtcaggaactcctggcctcaagcaatcctcccaccttggcctcccaaagcactaggattacaggtgtgagcccctgcacctggcctaattcaatttctcagaaggcgaaggggacagatccatccctgggaaagacatctgactgttctatgatggaaaagagaaaggactctgactccattagtaccccacgatgatctgaagctgcgaaagtgacccatcagaggagctgctgtctccaccatcacaggcaggtggggaatcaaaaagctgctgctgttgctgctaactggaattgtcggctccagacctctgcagggcttgctgaattcacacaggcaagagcctctcaaaacacactggtgatgatacagaagatagaaagaaattatttaggcagatagtaagagcaacagagtccttggtggaattcctctttaacaaaaagcagccccaaaatcatttcttttctaaacaaagagcagcctgaaaaattgagctgcagacatagataagcaagctggaagcttgcatgggtgaatgctggcagctgtgccaatagaaaagggctacctggaagccaggtatgttcaacctggaggctccatcttcccttttgtttgttaccacatgtgcggttaaaaaaaaaaaagcaggcaacatggcactggccaggtagacaacccatctgcataatgaagctgggtggggcagccagcttctttgcgcgctatgcaaacggcacacttagtcctaaccagttcatcatgtgctatgcaaatggcacacctggtccgaccaatctttcgtgtcctatgtaaatcagacacagcctcctcaatctcatctataaaaccttctgcatttcactgccaaagtggcaacctattttctccagaacccctctctgtgcagagagctcttctctttctttcacctattaaacttcccctcttaatcttactctggtggtccatgtcctagttttctgtggctgtgagacagcaaatctcgggtatttaccccaggcaatgacactgtttcagtggtatctcaaaaaaaatctaaacgggtgtggtggcttacgtttgtaatcccaacacttttggaggccaaggcaggcagatcacttgaggtcaggagttcgagaccagcctggccaaaatggcaaaaccccatctctactaaaaatataaaaaattagccagacattggtggcgggtgcctgtaatcccagctactcaagaggctgaggcaggagaattgcttgaacctgggaggcagaggttgcagtgagccgagatcgcaatcacgccactgcactccagcctgggcaacagagcaagactctgtctcaaaaaaaaaaaaaaaaaaaaaaaaaagaaccttagtctccacaacaacttatcttatcccagacactcctttctattgattccaggtcttgagatgataacttaactctttcaaccaattgccaatcagaaaatctttgaatccatttatgacctgtaacccctctgccccacttcaagttgtcccacctttctgggctgaatcagcgtataccttacgtgtactgactgatgtctgcctgtaacttctgtccccctaaaatgtacaaaatcaagctgtaatccaaccatctggggcacacattctcaggatttcctgaagctgtgtcataggtcatggtcctcacatttggctaagaataaatattttcaaatattttagagtttagcttttttcatcaacaaatgacatccttagtcctggccagaagtcagaaccaactgagagagagagacagatcagcatgtcatcagtatttcctaagcaatacgcaatatcagggaatgtggccaagctgtgtagcccaatgggtttgtcatcacctcctttgcttcctgtcgcctccaatctaaatatcaacataggatgtaagtttggatgctggtgatagattaaaaatagcaatggcttaaattccatagaaatgaatttctctctcctgtaacagtcctagctggtatgcagttctgctttgtgagggtatcatgagtctgtgctcttccatcttgttctctgctatccctatgatgctgagcttgtaaaccaaaaatacaactcaaagccgccacctaccacacacctaaaccatctgaacggactccctccttggccaggccactccaaatttaacctgaaagactggttcagcccatgacgggtgggatgggggttggggttggatgtgctgaagcagggttgttcgtcttgggtaatacccgaaattcgttgcctcaagccaatgaaatcaaggatgtggacccacaaggagtgaggttaggagcagaggtttaataggtgaaataaagagaaaattttgctgtctcctgcagagagagggggtcccaagagggttttccggtccatggtgaagtgcaggaggttttatagatgagtttgaaaaggcagtgtctgatttacatagggcacaaaatattggtcgaaccaggtgtgccatttgtatagcatgcaaagagctggttagggttaggtgtgccttttgcatagctcctgaaaaagctggccaccccaccccaatcttttattatgcagatgggctgtctacctggcctgtgccatgttgcctgctttttttttactgtacatgtggtgacaaagaaaagggaggataaagcctccatgttgaacatacctggcctccaggtagccctattctattggcacagctgccggcattcacccaagcgagccactactttggttatctatgtttacagctcagtttttcaggatgctctttgtataaaagacgtgactttggggcggctttttgttaaaagggaaattccaccacagactctgttgcccttactatctgcctaaacaatttctttctagctcctgtatgagtgcttcattatggccgcatcccttttggagttcaggaaaaacagaccagcatttaacatcgacacagacctgaagtctgataagaaacatttacaatccattctctctgaaggctgctacctggaggcttcatttgcatcataaaactctggtctccacaacctcttatcataactcagacagtcctttctattgataataactctttcaaccaattgccaatagaaaaatttttcaatcgacctatatggaagcccctcccccaccactttcagttatcccacctttctggactgaaccgatgtatatcttaaatgttttgattgatgtctcgtgtctccctaaaatgtataaaacaaagctacaccccaaacatcttggccatatgttttcagggtcacctgagggctgtgtcatgggctatggtcactcatatttagctcagaataaatctcttaaaatattttacagggccaggcacagtggctcatgcctgtaatcccagcactttgggaggccaaggtgggcagatcacctgaggtcaggagttcgagaccagactggccaacatggtgaaaccctgtctctactaaaaatacaaaaaacttagctgggcgttgtggtacacccctgcaatcccagctactcgggaagctgaggcacgagaattgcttgaacctaggaggcggaggttgcagtgatccaagattgtgccactacagtccagcctgggtgacagagcaagactctgtctcaaaaaatgtatatattttagagggttttcatcgacacgcttgttcccagggcccctagcgtgtcgcacacttgttcccagatcccccagcatgtccccacttccacctgaaggtagggaaaacaagaaagggagaactttattgaagggcatgacccagaaatggcacacaactcttctgttcacataccattcaccagaacatgctcacgtgactacagctgctgcaaggaaggctgggaaatttagtctttattccaggcaaccattggccaaacttaaactcctctaactatgaaaggactcgtagattggggaggcaccactagcttctctgccatatatatttacaaccccaatagttgcttcctctgctaaggcaggtacattatcacatagtaggaggaagcagaccaaactgtagtcgttctggagacaggtaaatccaaaaatgggaggagaggatctgagccaagtaagctcattttcttctcccagactcatcaaactcatagcaggggacaaaagccaaaagttttattccaacttcagatttctaactggggcagtattaatattttagctgagacaagtttctgttgtatgggacagtcccacctattattgcaggaggttttgcccaataaatgtcactactgtttcatcctcaggcattgtgacaaccaaactgtaggaagatgggctgggcacagtggctcatgcctataatcccggtgctttgggaggctgaggtgggaggattacttgaggccctgagttcaaaaccagcctgagcaacaaaatgagatcccatctccacacacacacacaaaatcaaattgtaggaagagatttccaaaacctctaggaggggcaggggatgccttcgactgggaaatataggggcatttgtaaccacaccagaccaatctgattcaacttttatgtaacaaagctgtaagttgtttttcagttgccacggactcccaggttgaaggtccataacctaagcatgcccaggtgaaccaaacgtgcaaccttgactgaaacccaagtactcagactgggaagtgaggattgaattaagaagtggacactgcatggcgggatccaggatccaatcacattgagccctggcatcaccccagggcacggtccaatcaaatcatgcctccccacatcacctcattacaagatccaatcagatcatgcctccctgcaaataattacaaatgtagtacgagaaacactgaggtttgggaaatgttcacaataaggcaagatccaatcagatcatgcctcattacccttgggactataaaacctgtcccaacccctagctcagggagatatatttgagcctgactcctatctccttgcttgacagccttgcaatacacttttctgtctacaaaatcccaaggttggctgggcgcggtggctcacgcctgtaatcccagcactttgggaggctgaggtgagcagatcacgaggtcaggagatcgacaccatcctggctaacacggtgaaacaccatctctactacaaatacaaaaaattacctgggcgtggtggcgggcacctgtagtcccagctacttgggaggctgaggcaggagaatggcgtgaacccgggaggcggagctttcagtgagccgagatcgcgccattgcactccagcctgggcgacagagtgagactccatcaaaaaaaaaaaaaaaaaaaaaaaaaattcccaaggctttggtgtgtggctttccattatgtgcaggcaaacagacccagttcaggtcggtgacatgtccttctcatagagatgtgagaaatgtaggattccctcacacagggcaggagaaatgatgactgatggtacagggactcaaggagccgggagaacaggtcttgaccttgaatgtcagtaaattcattgtctgagaatgggaggaaggaagtgagactggctcacaagtttatgggtgggggcaggaaataaaatgtgttcagacccagtgagtgaaatttaaccagaggaagctgagctggttcttgggtataattatgagtgatctaggctttgtatatggcagtgaaggctggaatggctgctgagaaaattggaaccaggaactgaccaacgagaaataaacagatttccagagattgctcaaggtctgtttgaagctgggcacatggatttgtggaatatgatgaggtttttttttttttaaataacccaatcaatcttttattttttaatttatagtaacccccttttattttttgcctttgttaaatgcccagacatgccacagtaccaagcattatcaataccaactcacattcctttccttatttaaaaaaaaaactaactttctaactcattacaaacaccccttcccctttcctctccactttcttttacgtgcccaccttatctaaaaaaaaaccaaacgtttagccaaccaaaattagtttaaattgtacgacccaaccccagccaatggggaaagggtaaaagagcaagacttgcatgaaaaatagactctcgtgcccctttgctcaggtatgctctcatggcaactggccaaagagacacccacccctctgcacaaaaataaaattgctttgctaaaaatcctttgttcaagtgttcaatttccttaaaattttaaacgttattcctaacagattcaaagtggttccaggatggaagggcaagttcaacctgtttgttccttcaacctggaatgcacttccccacagccccacactctcacccaacaccgacctctcttcacctatcacagagccaaactcaggatcccaggtccaaatccctaagtccaaatcctgattttgccacttacttgagcgtgaacttggacaatttatttaacctccatgaatctctgtttcctcatgtaaaaaaatggaagcaatttctaccagctagggatgttaggagacccaaatgactttaaaaggttgttgcacttaagaacacagcctccagagcctgatacctggttctgcccagttattcagcagcttcgtggcctggataagtcacttaacctctctgagcctcagtttccttttctgcaataggagaacggcagcacctgcctcacagcgttgttgaaaggataaaagagctaaacgatgtaaagtgtgaagttacataaacgaatatatgtaatgctaatctatgcaaagagtaggactgggctcagagccaagttctccataaatactagcaattgtcatgactatttcctccatatgggctcctgctctttcagtgacacacaaaaaaattccacatggtatgtggacagatatgttttattttcattttgttactgtcatctacatttaaatataattagcatattcatatataatttcgtgggtgttattgtttaaaaaaatgagtgaacttattttagatgagtcattttaaagaaaaatgttgagtaaagaaaagtgtagccggaggccaggcacagtggctcacgcctgtaatcccagcacttcgggaggccgaggcaggtggatcacttgagatcaggagttcaagaccggcctggccaacatgctgaaacactgtctctactaaaaatacaaaaattagctggacatggttgtgggcgactgtcatcccagctacttgggaggctgaggcaggagaatcgctggaacccaggaggcagaggttgcaatgagttgagatcacaccattgcactccagcctgggtgatagagcgagactctgtctcaaaagaaaaaaaaaagggtagccaagtgcagaggctcaggcctgtaatcccggcactttgggaagccaaagcaggaggatcacttgtgcccaggagtttgagaccagcctgggcaacataggaagatcccaactctacaaaaaaatttttttaattagtcggtcatggtggtgtgtgctgtagtcctagctactcggggggatgaggcaggaagatcacttgagccaagaggtcaaggctgcagtgagctgtggtcacaccaccgcactccagcctgggctacagaaggaaaccctgtctcaaaaaaaaagaaaaagaaaagtgtaggtgatgtgtgcatatggaaagaattacgaatgtggtatgagaaacactgaggtttgagaaatgttcacaataaacaaagcgggacatcagttaaagctgtgaaaaggatcttattcagtaaccactggcagtaggggaaagagctgagctccgttcagattcctgcagaggtggctgggtgtctagaaggcagaatgagggatggcgagagaagggcactgcaagtaaaaatcataaaaagttggctggctcatgcctgtaatcccagcactttcagaggccaaggcaggtgaatcacctgaggttagaagttcgagaccagcctggccaacatggcaaaatcccgtgtctactaaaaacacaaaaactagctgggcgtggtggtgtgcacctgtaatcccaactactcaggaggctgaggaaggagaatcgcttgaacccggaaggcagaggttgcaatgagccgagatcatgccactgcactccagcttgggcaacagagcaagacaccatctaaaaaaaaaaaattgtacagtgtcaatgggattcagccagctgtgtctgctagctggcaattgtcatagttagaattctatcctcccgcagagactgggagatggaggtcctctccttctgacaattctatttcaaaggaatggctttcagatcctctagaaacacccctgagttgtaggatatagatacatatacacccatgtctgaaaaaggaaggagtcataattgtaggcccttcttagtaaatgctctgaaaagggaaattaggggtatattgccagatattggctaggtcagacagtaaattctcctggcaaggtagagctttctcgggtggtattttaactgggggctggagtcatcctaagaacacgaccttatgctgctagatgccctgctaaactttgatcatctctttctttcttttctttttctctttttttttttttttttgagacagagccttgctctgctgcccaggctggagtacagtggctcaataataattcactgcagcctcgaactcctgagcgcaagcaattctcccacctcagcctcccaagtagctaagactacaggcacatgcatgccaccatgcccagctaatttttttatttttttgtagaaatgggggtctcattatgtttcccaggctggtctcaaacacctggcctcaagcaatcctcccacctcagcctccctaagtgctgggattacaggcatgagccaccacacctggccttggtcatctcttaatgcagaggtttacatggagttctgcagtcctcagaaacagtgacctgctaagttctcctcgtcctgcaggggtccgcttcaccgtctcttccccagagtcttcccttatccagcctgagtctcagctagattgagagtcagatcctttcaaagctctgtttttcatctttcctttccattaaagttctttcttttctttttttttttttgagaccgagtttcactcctgtttcccaggctggagtgcaatggcgtgatcttggctcagcacaacctctgcctcctgggttcaagaggttctcctgcctcagcctcccgagtagctggcatgcaccaccacgcccagctaattttctatttttagtagagacagggtttctccatgttggtcagtctggtccagaactcctgacctcaagtgatccgcctgcctcggcctcccaaagtgctgggattacaggtgtgagccaccgtgcccgacctcaatcaaagttcttttgggatttaaagtaactgaatcccaaaacaaactgacttcaggggaaacaatgagaatacacagaccagcatagcacacaagctgaaggatcagtatggacatcaggcacagctgaatctaggtgtttaaatgatgccattagaaatctctctttctgtgcattgactatgctttcacatgtgttggcctcgtttttaggcaatctctctactcatgatagaaagatggcccccagcagctgcacactgagatctcttcagctcagcaaacccggaagcaagaaaaaatgcttttaggctgggtgcggtgtctcacgcctataatcccaccactttgggaggccgaggcaggtgggtcactggaggccaggagttcaagaccagcctgggcaacatagtgaaagactgtctctactaaaaatatgaaaaaattagctgggcatggtggcacatgcctgtaatcccagctaatccggaggctgaggcatgagaatctcttaaaccccagaggtggaagttgcagcgagcagagatcacaccactgcactccagcttgagcaacacagcaagactctgtctttaaataaataaataaaaatttaaaaacagaaaaaagaaaaattgctttattccccagagttccaataaaatccgtaagagattgcttctccttggcctgttctgagtgccacgcccaggtctccaaaaatcactgttgtcaggggatgaagtgctctgattggccagtcctgggcccctcacctccctggagccatgaggaggctggtttccaaaagagaactccaggtgctgttacctggatacaagagagtactggctgggtagaaaccccagaaaccttacaacataatggttattaactgcatcgtaaatatttactttttcctacagtggtctcctgacctagctaatcactccagcagaggccttcagaccaaccataaaaaaggcactttagcaaatgctaataaagaaataactgtgtcacctgataatgactattattagagacttatgggtgaaccttagcccctgggtggaacctgaacctctctgggagggaaaagcatgagcttctaagtcagaaagatctgagttcaagtctgaacactcccatttcactcacttgctcttcattcatttattcactaaaaagaaaacatgtaggctggctaggtggttcatgcctgtaatcccagcactctgggaggctgaggcaggaggatcacttgagcccagaagtttgagaccagcctgggtaatatagtgaaactctatttctacaaaaagaaaaaaaatttaattggctgggaatggtagtgtgagactgtagtcccagctactcaggagactgaggcaggattattgcttgaatccaaaaggttgaagctgcagtgagctatgaccgtgccactgcactccagcctggctgacagagtgagaccccgtctcaaaaacaaaaacatgtattgagcacctgttatatgcaaggcactgttctagtcactagggacatagccacaagccagacaacatccctgccctcctggatctgatattcaagtcggagaggtgggactaaggagggagagacagataatacaagtggacaaataaataaatcatctaaaatagcggtaaatgatgtaaagaaaacaaaacagtgtggcttgctagcaaagaggtggggaactgagttgcagcaggcattaagaaaggcctttttgatagagtgatgtgtgtgaattaagccaaaataataagatacagtcagctttgagattacatgagtaaggttctaaggagagggaacggctcatgcaaagcccctgagctggtgcctccaaaaactggcagaaagcccctgtgaacggttgtgtgatggtaggtgagttacttagcccctgtgcaccacgagaaaatggggatgctcatatctacccctcgaggttgctatgaggattcaaattaggcaaccctgttacaaggttaatgctgtgtccggcatatagtaggtgttcaataaacaccagctattagtttgagtaatataattattaatttgaggaggaaagaatggacctggggagtgagaagggtgaggaaaaagtagctagtgtagcttatccttctagaatctaaaattcaggatatagtctgagcaagctcctgataacgggattctaaacatgcctccaggacatcctagacaccaaattataattagcattgacttcatagtgactgccattcgttgagcgcctactacgtgaccaggcactactccaagcaccttgtgtccacggccctgtctgactctggggcaggcactattattaacgcctccattttacagaggagaaaagctgtggttcagagtccaaagccccgtcacctcctaccaggttgacctttggccattccttgcctttgatgtgagtgataggagcgggcgattctgcttctccctccatctcccggcggggattgtacggtgagagaatgagagcaaaacctcagagcccccttcccaggaaccctgtcccagcctggtccccacccaccaccaccactgacccgatgctagagaaggatgcggctggaggtgacttcccagccaacttggtgtaagtcatgtggggaagtggccagggtagggcatggtcatcgtgagcagggtcctgcagggtgaggccggggctgcagacgcgactgtacaggtctatgaagaccccatgtgtgatgaggagaccttctctgcacagtccctggacagaacacgagatgaggggtcctctggacgtcagctccagccacacccctacctggaggaagctgcttttaacaggtgcgttggagacagcggcttcaccacgggccagggacaaggaggagagtgtctccttacgagtccaagtcacccccactcagagctttgaccctgtcagtttgaggcccatgcagctcaggcacccaactcatgagaactcttgaaggccactccgccacaagagatgaccctattggcttcttttaggaagaagggaagtgaggcgcaaagaggagaacaggtcacctacccaagatcacagggctggcaaggggcaggatcagaatttgggaccccagcccagcccccttccaccagaatgccctgtctcacccctgcaatccgcaacttagtaataatacatataaataataacaatcataaaataataacagccgtaatagaaggtcactgtaactgaatagatctatataccagcctgtttggggtttttgtttttttgttttgttttgttttgagacaaggtcttgctctgttgtccaggctacagtgcagtggcccgataatgactcattgcagcttcaacctgctgggctgaagccgttctcctgcctcagcgtcctgcgtagctgggaccataggtatgcgccaccaaacccagctaattttttatttttagtagagatgaggtcttactatgttgcccaggctagtctcgaactcctgggctcaagcgatcctcctgcctcggcctccccaagtgccaggattacaggcgtgagccactgcgcccagcctgtcagcccgttctaagtgctttcctatagtaacatttacctcttatcacaactctttgagatcagagctgtacgatccctatttcacagaaggggaaactgaggttcagagaggtcatgtgccctctccaggtcacacacttggaagtggcagactgaagatttgaagccagatgggctggcttcccagaccacactttccagagaccacacacatctgcctctcagatagtgaatgaattgcttccttatccaggtcttaaaagttcacttctgagttgggcgcggtgactcacacctgtaatcccagcactttgggaggccgaggcaggcggatcacgaggtcaggagatcgagaccatcctggctaacacggtgaaaccccgtctctactaaaaatacaaaaaattagccaggcctggtggcgggcgcctgtagtcccagctactcagaaggctgaggcaggagaatggcgtgaacccgggaggcggagcttgcagtgagccaagatcgtgccactgcactccagcctgggcgacagagcacgactccgtctcaaaaataaataaataaagttcagttctgagccgggtgcagtggctcacgggtgcagtggctgggattacaaagtgctgtaatcccagcactttgggaggccaaggcgggcggatcatctgaggtcaggaattcaagaccagcctgaccaacatggagaaaccccgtctctactaaaaacagaaaattagctgggcgtggtggtgcatgcctgtaatcccagctacttgggaggctgaggcaggagaattgcttgaacccaggaggcggaggttgcggttagctgagatggtgccattgcactccagcctgagcaacaagagcgaaactccatctttaaaaaaaaaaaaaaaaagttcagttccatgtaattttaaaacctcaaagtccacctagttcaaagctttgctctgtccccagctcaggcaggtgtcacactggaaggaggaaagggacgtggtgggcctcttccctattttgtcagagctgttgtctgaggcctctctcagggcggagggcagaggggaggaaggaaagaaaaggagattggaaagtttctcctaggctgctgtagttttgtgatggaaacacggcatgctgtgtgttgctggatcttcctgggggcgggagggtggggtactttggaaattggctgtgccactggataaaacagcaaccagtttttagaaagtggtttacaacatgtttgcaaagtgagctgggggagcttacaaaacattgtccaaaggaaaacaaagccacagtgcaacgaacttcaactctgtaaatacaaaatgttctcttgataacagcaggtacctcgagagtgtgaccaggacaagcgtaggggtggaggtcaaagggatatttggctttatatgggtctacttttttttcctaaggagaagctcttgagtgattaaaaattaattttaaaaattatgaaaaaccttcaaagaaaatatactccccaaagtggttatctgagtattaggcttaaggatttgttttactgctttttactttactttccaaattattctataatgaggagcagacattgttttttctgatgccttgtaagaattgctgaacataattctactttttgtttaaaagaaatagaaacagccaggcgtggtggctcacacctgtaatcccagcactttgggaggcccaggcaggcggatcacaaggtcaggagattgagaccatcctggccgacatggtgaaaccctgtctctactaaaatacaaaaaaattagctgggcgtggtggcgcacgcctgtagtcccaactactcgggaggctgaggcaggggaatcacttgaacccgggaggtggagcttgcagtgagccgagattgcaccactgcactccagcctggcgacagagcgagactccatctcaaaaaaaaaaaaaaaaagaagaaggaaatagaaacaataacaagcataaagcttgaaaaaaaaaaacagtaaaagtttccaaaacatagtgtttatttctaggagtctaagttttctgctataaaaatggaaataaataaatatatatatatgagtatatatgagtaataccatatatgtagagagagagagggagagagagaaaaagagagagagagagagggagaaaggtcttgctctgtcacccaggctgcagtgcagtggcaggatcatagctcactgaaacctcaaactcctggacttgaggaatcttcccacctcagcctcctgagtagctgggactacaggcgcgtgccaccatgcccagcgaattttttatttttgtagagacagggcctcactcagttgcccaggctagtcttgaacttctggctcaagtaatcttccagccttgccccacccctccccccgcccccgcaaagtgcaggattacaggtatgagccaacacaccggcctactcttatattaaaaaaaaaaaaaaaatgcctatcaggagtgaaaggattaggtgtggtgcccaagagacgcagggattctttttgggatgacgaaaatgtccttaaattgcttgaggtgatggttgcccaattctgtgagtatactaaaagctcttgaattgtacgctttaaatgagtaaattattggctaagaaagtagattttatgtgttctcaccacaaaaaaaataagtacatgaggtaatgcatatgttaattagctcaatttagccattccacaatgtatatgtattttaaaacatcacattgtacaccataaatatacacaatttgtatttgttaattttaaaaagaaaaaatagtggcaaggttataacttaatcagtgtccagaacaaacattatgtcaccctttaaaaatgtaccattcacattgatttataaccctttattatttctaaataaggtggtgagaaaatgttgggtgaggggttgggtaggagtaaatggagcgaagcagatcccagaaccagaagacattagtagtatatggagagagacactcaacaggagctgtgggctggaacagaaggacccagccaactgtaggactaatcccttcaagcttactcccccgctgccctctcctcttctgccaacgtgcccactgacagaaaccaaccagcagcaaaaggtaaggggaccccaacaacacagctcagagaagtcagcctttcaggcagcagagtggagcagagaagggtagaaaaccaatttttgcaacatccagtataatatacgtgcgtgcttcaaggggtcaaggagaggaatcaatgattcctcctccttccctgctcttccaaggcgccctgctcacatcctgcacctgctctgccttctcggagctgcccttctcggcacagctgaacaccttgaccgaaggagccagtgtccatcttcctgtccccggaaggcttgaaggcattctcaccacgtcttggttctgagggtatgacgcccagccagcagccatgatattctccccgaagggcctcccaggacctgctcacactggccgggagatgctgggaacccaaggcagcctggtcattagaaaatgacggctcaggactcgggcagctacaccgtcgtgctggaaaccagcaggggacacaggagtgtgacggagcagatccatgtcaagagtgagtggggccccgcagtgggaggggctgacttctcagaaagcagacccactggacctcagaagagcccaccaggacactttgcatgctggttatccattgctccccaataaaccaccccaaaacttaaaacatcaatcacttatctagctggacagttgttgtgttcagctgttggggtgtctgggtgttggctggtccagaatgacctccttcatgtgcctggccatggaccagctggtggctggagtgatggggatgagtgggccacatagcctcccaacctccagcaggctatcccaggcttgttcactcagcaatggaagaggaacaagaggtaaagctgcaaaactccttcaggcccaggctcaaaactgaccaccatcacttctgccaccttctattggtcaaagcaagtcacatggccagcccagcttcaacaggaaggaaaaaggccccacctcttaaggagaggagttgcaatgtgttgtggctattttttgtcgttgtgttagattgttcttccattgctataaagacatacctgagactgggttatttatttaaaaaaaaaaaaaaagaagaagacgtttgattggctcatggttccacaggtggaagtgtaatgccagcatctgctcagcttctaaggagccctcagggagcttttaatcatagcgaaggcaaaggaggagcaggtgtctcccgtgagaacaggagcaagagaaagagagagtcagagaggaagtgccacattttacaacaatcagatctcatgagaactcactaccatgaggacagcgtcaagccataagggatccgcccctgtggcccaaacacctttactgaggccccaccaccaacactggggatcgcatttcaacatgagattttggcagggataaatatccacattataacagccaagacttgcaacagacattcatgagatacgcattcatcatcacttgggaaaggtagagaaggtctggtagcagccttcaacctcatctatatttttatcacctggactcaaactttcatatctgaattaggaaaacaaagccctgagagtaaccagacccatcctccttttagaagatagtccagagactgtcctagtcggctcgggcaaaatactctaggcttaatcaacagaaacttattccctcacagttctgaaggatggattgcaagatgaagctgctggcaggtttcatctcctctgaggcctctcttttttgacttgcggaagggtgccttctcattctgtccttgcatggtctttcttctgtgtgtgcacatccctggtgtctctctgtgtgtccaaacttcctcttcttataagggcaccagtcaggttggattaggacccaccctaacaacttcattctaacttaatcacctcgttaaagaccttatctccaaatacggtcacattctgaggtactgggggttagggtttcaacatatatgtttggtgggggactcaattcagttcataacagagatcaacttagttagggttcagattctgatgctctaacaaagactcaaaaagttccagtgtcggccgggcgcagtggctcacgcctgtaatcccagcattttgggaggccaaggcgggcagatcacgagttcaggagttcaagaccagcctgaccaacatggtgaaaccccgtatttattaaaaatacaaaaattagccgggcatagtggcaggcgcctgtaatcctagctattcaggagactgaggaagtagaatcgcttgaacctgggagtcggaggttgcaatgagccaagaccatgccactgcacacttagaaccccacttctgcacagaggggtttttactcccctcccagagaatttatggaccgctgaggttcatccatctgtatttctgtgatttgatgactaattttgtgtgtgtgtgtgtgtgtgtgtgtgtgtgtgagatggagcctcgctctgtcgcccaggctggagtgaagtggtgcgatctcggctcactacaacctccaccacccgggttcaagcgagtctcctgcctcagcctcctgagtagctgggatcacaggcgcccgccaccacgcccggctaatttttatatttttagtagagacagggtttcaccatgttggccaggctggtctcaaattcctgacctcaggttatccacctgccttggcctcccaaagtgctgggattacaggcgtgagccaccgggcccggcctgaaggctaattcttctaaaggcctggctccacaccttcgcctatgccattctcagtccgaagggccctttctaaagagagaggttgcaggaactcacgctcggtggtgcaggctgtgtggccagaactccctggatcaaatccctctggcatctgttatgcccctgagtccctgcaaaaaagtaactttctgttttgcacttcagtttccccatctgtgcaatgaggtcatagtggaacctacctcatagggtgactgtgaggagtaagtgagttaatcagtgctaaatgcctacaacaatgcctgacaaagagcaagtaaatgttagccctggccaggtgctatggctcacacctgtaatcccagcagtttgggaggccgaggtgagaggattgcttgagctcagaagttcgagaccagcctgggcaacatgatgagacgcccatctcaacaaagaatttaaaaattagccaagcctggtgatgtgcgcccatagtcccagctactcaggaggctgagatggaaggatcccttgagcccgggaggttgaggctgcagtgagctgtaaccttgccactgcactccagcctgggggacacagcaagaccctgtctcaaaaaaaaaaaaaaaaaatagccctgtttgtttcaaaggacttgacttctttgagccttccttttctcatcaaaatgggaataaggccggcacagtggcttacacctttaaccccagcactttgggaggacaaggtgggtggatcacttgagcccgggagttcaagaccagcctgggcaacatggtgagaccccatctctacaaaaaatagctggatgtagtggcgcacgcctgtaatcccaactactctggaggagactttgagcccgggaggtggaggttgcagtaagctatgattgcaccactacactccagcctgagtgacagaacaagaccctgtctcaaaaaaaaaaaggaataataataattacttcataggattgttgtgaggattaaatgaataaatccagtggctttcatgagaaatgcttttcacatcatgtccagtatatcccacaactaaccaaaaggcaagtgtagtaacagttattactatgagtaatgctctctgatgttttctataatatttcttttcatgttttgaatgttgatcacagtctactaatgatttagacacctgggcatgggtctcgcatgcagtataacaagccatggattaacacgtgtgcttggctcatagtaagagcccaatccatggccgggtatggtggttcatgcttgtaatcccagcactttgggaggccgaggcgggtggatcacctgaggtcaggagtttgagaccagcctggccaacatggtgaaaccccatctccactaaaaatactaaaattagccggatgtggtggcgggtgcctataatccagctatagagaggcagaggcaggagaattgcttgaacccagggggcagaggttgcagtgagccaagctccagcctggatgaaaaagcaaaactccgtttcaagaaaaaaaaaaaaaaaagagcccaatccaggtggctgttatattgcctcttgtttgtacacctagtgggctctttctcctccttcaaggcttaactcagacacctcctccaggaagcctttcatgaggtctctggttgtgctaaagttcttttcacttataacattgcattgaaatcagaaatcagctctaagtggaagttcccagcacagtctgggagttcaaatcccagatgtgtccctactagaccacgaagcctggccctaatgagccccaaacctcagagcctttcacctgaaaaatgcagacaagaagtggggacctcttgggtcacctcctcgctgggctgtttccactcctccaaacttaaagtcaagttctcacatgatagccagagtgagcctgttcaaacctaagccagctcacgtccctcctctgggcagtcctcccatgggtcctactgcactcagagtcaaaatcagagtcctcaccctggcccaggaaaccccagcatgatctgctcccattatctctctgacttcttctcccagccctctctccctttccctcctctctatgcccaccttggctcacacccatctcagggccttttacttggtgttccctctgtctggaacatttttttcttaggaatccacatggcttattcctctgcttcttcaggactctgctcaaacataacctccccaaagaggtcctccttgacccaccttacctgaaacgggtttaccccacccccagtccaaccccacagccctgtgcagttttcctcacagcccttaccaccactatatatacttgtcagtttgttgaccctctcctcactcagtcgtaagtttcatgagggcagcaacagcgtctgtttaatcactgctgagcccccgagtcctagagccttagagtcctagatttggttcacccagatccagaggcgaggattcaaggacagatagtctgtttgggaggtgcaaggaactcgagagtggggaagttaggcagagaaggcaggaaataataaaagctgtgttcccaagctggttaccatgggcaactggagcacagtcccattggggaactcaggccctggtgtggaatgactctgcagagttatcccacatagcagagagggagctggggaatttatataccaacgtgtcctggcattgtggagggctgctccctgatgtgctcattccccagcacttccagcctgctgcctccatgggcagagtaggctttggccaccagtgaaagtcctcaggcaacgggatgcaggtgctggccgttggaagtgggaagggcaaggggttggactgggggcactgggcacagaccaggctcttcaaacacattcatgggtgaattaatgaatgaatgaacacatgaaagaatggatgtctctatggtgggcagaagaaatgcccagcttttctgagtggactccactcttgtggccttgttccctgtttacacagacagcctccaactaatgccactgaagacattcccagctgctatccggggagtcatccagagtgagctcaactattctgtgatcctgcagtgggtggtgacaatggaccctgagcctgtgctgagctggaccttcagtggggtgccctgtgggatgggagagaagctgttcatccgacggttgtcctgtgagcagctgggcacctacatgtgcatagccacaaacagcaagaaacagctggtctctgagcctgtaaccatctcgctgccaagtgagtcccccattccaccccaccccaccccacccaagagccctgcaccctctccagcctgtggcagcctctatgattccattaagccacctactatgagcagtcccctgtgagaccctttataggcaaaatgtcattccaatgttccatccacctggcggactgtggattattaggccactttcttcttctttcttctttcctcttcttcttcttttctttcttcttctttttctttcttctccttcttttcctcctcctcctcctccttcttcttccttcttcttctccttctccttcttctacttcttcttcttcttttttttttttttgatagagtcttgctcggtcacccaggctggagtacagtgctgtgatctcaactcactgcaacctctgcctcccaggttcaagtgattctcatgcctcagcctcctgagtagctgggattacaggcatgcaccaccacatctggcctatttttgtatttttaggagagacggggtttcactgtgttgtccaggctggtctcgaactcctgggctcgagtgatccacccaccttggcctcccaaactactgggattacagacatgagccacctcgcccagccaattaggccattttcagatgacaggctgaggctcaaagaggttaactatgatgaaagcccagcttaggatctggaccaggctacctgggtccttggctccaaccatttgcttgttacatgaacatgggaagcctctttgcctctctgagtctcagcacatacctacaaaaaatgcagatcaaaatctaaggagtgggccaggtgcagtggctcacacctgtaaccccagcactttgggaggctgaggcaggaggatcacttgagcccaggagttagagaccaacctggacaacatagtgagaccctgtctctaccaaaaaaaaaaaaaaaaaaaaaaactaaaaatttaatcaggcatggtaatgccacctgtagtcccagctgcaatgggaggatcacttgagcccaggagtttaaggctacagtgagctgtaatcgcaccactgcacaccagcctgagtgacagaggatgactgtctcaaaaaaaaaatcaccattgtcatcatctaaggagtggttcaaagcaatggctttggaatttgaatccctggctgtgtgactctgagccagtgccttgacttctctgtgcctcagtttcctcatctataacactgggaagataatagtgcctaccccagtgtgtagttgtgagcattcaatgagataagccggtgaatagcttaaaacaataatgtctagcactatcgaacactaatgagtgctcaataaccgtgagccaataacactgttgcaattagcattgtcattattaattgtagctattaccatatacagtcggtatatggagccctaggtggcaatcaaaatgacagcaagttgttgagatcagagaagtggtttgggacctggtcaaaactcagttcagtccctgttcccgtgccttcctggctgggtaacttagcgcaagtgacttcccctctctgagccccagtttcctcatgtgtataatggaggtaatcctatatacctcttcagggttgttataaggaacgaaaacaaggggtgactgagtttggcagaacaactgtcaggcagcaggtgccttgaatagcagctgttatggtgaatattgtttttagtgtgttattcatggagggacacatggtgatatggtttggctgtgtccccacccaaatctcatcctgaattgtagctctcataatccccatgtgtcatgagagggacccggtaggaggtaactgaatcatggggtcaagtttttcccatgctgttctcgtgatagtcaataagtctcacgagttctgatggttttacaaaaggcagttcccctgcacacattctcttgcctgccgccatgtaagacatgccttgctcctccttcaccttctgccatgattgtgaggcctccccagccatgtggaactgggagtccattaaacctccttttttttaataaagtacccagtctcaggtatttcttcatagcagtatgaaaatggactaccatggcttggagtgaactagaggtatgcagaggaactggccaggagagaagagagggagggtatttggggtaggaaagaatgcatgagtcaaggttcagagctgggacatggaaatggaatgcgtgatgggaatctcagcttggctgggtcccagagaaccacctcacctccctggccagggtccagtgggagcttcagggctgatgcactgggggaaaaaatgtaaatcttatatcacctagtgaccctgatattcagtgagaaggacaatacttccaagacctcctttgctcattcatcaactgcccaggaaatgtttatgagcacttgctgtgtggccagcccacacagctgggaacactctggtgaccaagacagctgcagccctgccttcacaagacttacagtccagtgtccacagacagtgatcaccagagtgggcagggctgggatgggggagcccagagagctatgagactcagcctaggagttaaggagggcttcctggaagaagggacacctgagctgagaattatgcttagctggccaggtacagtggctcattcctgtaatctcagcactttgggaggttgaggcgggtgggtcacttgaggctaggagtttgagaccacgctggccaacatggtgaagtagatggtgaagaagatggtgaaaccccatctctactaaaaatacaaaatttagctgggaatggtggcatgtgcctgtaatcccagctaccagggaggctgagacacaagaattactggaacccaggaggtggaggttgtagtgagctaagattgtgccactgcactccagcctggtgacagagggagactctgtctcaaaaaaaaaaaaaaaaggaattatgcaagccaagagagagagatggcattccagagagacagtgcagcatggacaggcctggaggcaagagagaaagaaagggatgagcttggaaaattgagtggagtccagggttgcatggctataaaggcagggcaatgagagagatgaggctggccaggtggcagggcctcgaaggctaaggtgagaaactgacttctgccccagggtgctgggaagccacagcagggttctgagcaggggaggaacagggtcaggtgtgagctttagaaagatcctcctggcttccatgtggtaggaaggtggatgggcgctggactagggcaggagagcagggaggagagggggccagagacctggaggatggaagagaaggatggattgaagagacacttgggagggggaatggcaggagggaggggtgcacagggagggcgggcagatggctcctccaatctcacccctccttggtccccagaacccatcatgcagcccacagaagcagagcccatggagccagaccccactctgtccctgtcaggaggctctgccatcgggctccttgcggctgggatcctgggagccggggcactgattgcaggcatgtgtttcatcatcatccagagcctaaggtacctctatccctcacccccgtccactgggcaacatccactcagcccccatggggcacagagctggctcaacaaggaaacagagatgaaaccaacacccccatcagggagggtgatagcgactcctgaggagcccatctgactcactggtttccaaaatgggatcacagcaacaaagagatagaagaggacactagagctgggctgtctggcttcaagtcccagctctgtaacttactagcagtgaggctgtgggcaagccactccccttctctgtgcctcagtttgcccatctgcaaaatggggatgataataatagcatctgactctctgggttgttgggttgggttgttgtgagtgaatttttctttttcttttttttttttttttgagatggagtcttgttctgttgcccaggccggagtgcagtggtgcgatctcggctcactgcaacctctgcttgccaggttcaagcagttctcctgcctcagcctcctgagtagctgggattacaggtgcataccaccacgcctggctaatttttgtatatttagcagagacagggtttcgccatgttggtcaggctgatctcaaactcctgacctcatgatctgcctacctcagcttcccaaagttttgggattacaggcatgagccactgcacccgtccagtgagtgaatatttctaagaaacttaaagcagtgcctggaatgtggtaagtactatgttcgtcctctctacacatatctgcagtgaccgctctgtgccaggcactgaggataccgagggaagaaacagcagaaagtccctgccctcatggaacttgcatcctggtcggggacaccatcaagaaacacaatgaatgagtgaaatatagatagtatattggatgggccaggtgtagtggctcacacctgtaatcccagcactttgggaggctgaggtgggtagatcactcgagcccaggagtttgaaaccagcctgagcaacatgacaagacatcttgtcatctctctcaaaatataaaaattagccaggcatggtggcatgcacttatagtcccagctactcaggaggctgagatgggaggatcacctgagcccaaggaagtcaagactgcagtgagctaggatcatgccactgcactccacactggacacagagtgagaccctgagtcaaaaaagtaataataataaatcttttaaaaaagatagtatgttggatgagcgctaaggagaggagtgaggctgggaagcaggacaaagattgtggagtggggtggcatttaacgagtcagggaaggcctccctgggacagtgacatttgaacaaagggagggagtggggagccacgtgagggtctgaaggaatggcatatccagcagagggaacagcaagtgcaaaggccctgaggcaggattgcctggcatgttcaggaaatagtgaggagcccagggtggccagagtggtgtgaagaatgggcagagaagtagcatgtgggtcagagagggagtagggaggcaggggaaggcagctagacccttgcataaggccttgtaggctctctgagcacttggcttttgctctgagtgagatggaagccatggagggtctagtgcaagggaaggatggcatctgacttatatttgatcctatatgttggctagtactacaacgctattaatatcttaccatcagcaaggcatggtggcccacatctgtaatcctagcactttggaaggccaaggcaggaggatcacttgagcctaggagtttgagaccggcctgggcaacatagtgagaccccgtctctaccaaaactaaagttttttttttttaattagctgagtatggtagcacgtacctatagtcccaccacttgggaagcttaggtgggaggattgcttgagcccaggaatttgaggctgcagcgagcgatgatcgtgccaccacactccagcctgcttgacagagcaagaccctatttctaaaaattaaaaaaataatgtttttaaaaaacttgatcttaccatgtattgagcacctattatatgctttcttttttttttttttttttttttgagacggggtctcactccattgccaggctggagtgcagtggtgcaatctcggctcactgcaacctccaccttctgggttgaagtgattctcctgcctcagcctcccaagtagctgggactacaggcgggcaccaccatgcccagccaatttttgtatttttagtagagacggagtttcaccatgttggccaggatggtcttgatctcttgacctcatgatctgcctgccttgcaaagtgctgggattacaagcataagccaccaagcattactctatttaatctccataagagctggggaggtgagggggctgtggtaggggtgaagatctcatttcagtccagagagtagtgatctgcccagggcccacagctggagagaaaggattcaagcctagactcctgcctgccactttgttctagctcctgtctacactgccttttccaccatcagtaactgtacagacctctgtaatctatgttgtgaggaagagaaatctgtaggtggtagtggtttagggagacattgtggaccagctgggaggaactggggccaggtctccatccatgagtcctgcacacaaccatctaggggcaagggagggccagcctgcagcctcggccacccagattgccttcatcattgtggcagctccgatgtcctggcccctcagcacgtaccaggtgctgaaagccccaactctcagggctaggtgctattattgtcgtcatttcccaagtgagtagagctaacgctcagaaaagctcattaacttgcccaaggacacacagcgaatgaatggctggccctgaatcaaaccctgatctaagtctacagaggggaaaggtgaggagtcaggctggcatgaaaatcctcacccaggcacctcaagtccctgccctcatgagcaggcaagaagggtcactttctgtcttccccgcccttgtggccaagacctatttagttgtgagcaacagactcctgggacaaggccaatgggggcatcagctggaaggagctagcctcatccaatcagctgtgaccttgcagatgaggccacgtgtcatggacatggctgccttgaccctcccagtgaggaggaacatttctcagaaaagaagtgtatatgggctaggcaggaaccccatgcatgcctaacatgcccaccaagggccaggagagatccccattgtttgtagttgaggagagggacctgaagccaggctacttatattcacatctcagctctgctgtacatgaccttgtggaatttgggggagccctttaacccctcagtggctcatctgtaaaacaggaatatggcagtgtgtggtgctcacaattgtaatcccagcactttgggaggctgaggcaggaggattgcttgagtccaggagtttgagaccagcctgggcagcatagcgagactcatgtctctacaaaaaaaaaaaaaaggaaaagaaaaattcactgggcatgataacacatgcttgtggttccagctactcgaaaggctaaggtgggaggatcgtttgagtctgggagttcgaggtggcagtgagccattattgctctactgcactccagcctgggtgacagagtgagactctgtctcaataaacatttttttaattgaaaataaaaattaaaaacaggctgggcacagtggctcatgcctgtaatcccagcactttgggaggccgaggcaggaagatctcttgaagctaggagttcgagaccagcctggctaacatggtaaaaccccatctctactaaaaacacaaaaattaacaaggcatggtggtgcatgcctgtaatcccagctatttgggaggctgaggcaggagaatcatgccaagaccagctcagtcagggaaactctaacccagcggtgctagaggaattaaagacacagaaatatagaagtgtgaagtgggaaatcaggggtctcacagccttcagagctgagagcctcaaacagagatttacccacgtatttattaacattagcattgtttctatagattttagattaactaaaagtatcccttatgggaagcaaagggatgggctgaaataaaggcatgggtatggctacttatctgcagcaggagcatgtccttaaggcacagatcactcatgcggttgtttgtggtttaaaaacgcctttaagtggttttccgccctgggtgggcaaggtgttccttgctcctcattccagtaaacccacaaccttccagcgtgggcgtcatggccatcatgaacatgtcacagtgccacagagatattgttcatggtcagtttcggggccagtttatggccaggttttgcgggggggcctgttggtgcaatttaagctaaacatccctttaggggaccaattaataatgattccataggaatcgttgtgcagcacctctgcctgttctgcaatgcaatcttcctaaacaagtatgttcattttttctggccaggttcaattttgttacagataggtttttgagggcagtatgcctcaattataggaggagatttgttatggtaaatactgagatcagaaagcacatgtaactgtgtcatagagtgattacatccaggcattattgccagccaagattgatgaatatgcctaataagtataattgttctctgtgtcagcccttctttaaggaatactcacggcaatggtgattaccactatcatagctaccattactcattctgagtggttgtcccgctttcctcaggttttcttccatcatctgtgacagcttcttgatctgtctccagctgggtggctgtgttcgacgggtgtttctcgtgacagttggggtcctcctcagcatcagcctcgacatggctgcaaccggggggtcctcaggatcctcccggagtctcttccttggcatctggctcatgctaaaatttcaggtgtcttgatggtatccaaatcagctgttcatgttggcctggagaaacacaagcataaccaacaccccaagttattattttacctacttcccaactttttgttattggatctctccaccaaaccaattgttctgcttctgtctttgcagctggtttctgtagatgctgttcagctgctgataacatctggcctttgggcaggctcaaaaaatttaaagttaataatgctagactcaattgtgtatgggctgtcccataatccctgtttctccctcttttttgtttttgtcatcagttgttcatctgtatgaaatcataactgagcattttcaattaactgtgtggaatgaaccacgtatgaagaatcagaaatcatattaataggcatatcaaaagcagtcaatacctcaattacacctacaagctccgctttctgagctgaagtatagggcgtctggaaaactttacctttcaagccagaataagaagctgtactattactagacccatctgtaaaacaatgaaaatgcttagcaggctacagtatgtaaatgcaaaccgttcacagtcttgctcagctaaggggatagtaaagaaacagtcttttaaatctatgactattaaaggccagttttaagtcctctgaagcctccagtttctctttactcagcggccactgttctaaacattttaaaggtataggttctggaagcttaacaatggctgccatcaaaaatgatattctaatctttggcgggaactttgtctttccgcttgaagcggttctttcaaaccttgcaaatttttttctagtctcatgctagggacatgccccatttcatgcatcatatgttgattttgaaggatatataattgttctggagttagaacttgtgctccccattgttgtaataaatctttcccccacaaagttatagatacagaagttataattggttgaatagtcccaagttgtccatctggcccttcaaaatgcaaaatatagctactttgatatacttcaggggctttaccaactccaactatgttaaattgagtgggttgaattggccacgtggacgaccagtgctgtagagaaatgattgaaatgtccgctcctgtatctgccaagcctttaaatttctttccctgaatagttatttcacaggtggaatgtttatcagtaatttgatttacccaataagctgctttgccttgtttctttgtgcttccaaatcctcctgttcatttaatttcacttttccccattcccacatacggcacaatcaggagctgtgctgtgcgctctcctggctctgctttccagggaacagaagtagatgtaacaatttgaatttcctcattgtaatctgaatcaatgactcctgtatgtgtttgtaccccttttaaacttaaactagaccttcctaaaagtaatcctattgtccccgctaacaagggtccacagactcctgttgggaccttttacgggggttccccaggcagaaggctcacagcttttgtgcagcataaatctactgcggcactaccggctgtggcgggggacagacattgtacgggtgtgagggaatggcctgagctggaaatgccccagtttggaatggggcccaggacaggcccctcatggcatttcctgaaatcaggttcccttctttatcaaacttagagtgacactgattagcccagtgttttccttttttacatgttggacatatttcagactcagcagttttcttttttcccctatctggcagctgacttgctgattatttctacattcttttttagtatgaatagcttgtttaaattctttgagtaatttacaaggaaaaggctcaaatgtagctataatatttccctgttgatctggggggtgtattctaacagggaactgccaagcctctaaatcaccttctcttctagcttgctggattcctgcctgaatagaactgacagcagtcgctccaggcgctgctcgaacagtcactggggcaactacttttcgcccagcgtcctccagaaaagaaagaactggagggtcaggccactatttatggccagttttggggccagtttatggccagattttggggggcatgttcccaacagaatctcttgaacctgggaggcggaagttgcagtaagccaaaatagcgccactgtactccagcctgggcaacagaaccagactgtctccaaaaaaaagaaaaaagaaaaaaaaaaaaaaacccagggatgtgattatacttccctccaaagacaggagtgaggattaagtaaaatggtgggagtcatgagctgtgaacagtgcctggaatgtgatgagccttcaataaacctcagccatgtgatgatgatgattgtattagtttgctccagctgctgtaacaaaaatgctacagaccgggggggcttaaacaacaaaaatttattttctcacagtctggatgctggaagtccaagatcaaggtggcagccagtttgatgtcccatagtgcccctctccatggcttgcagaaggccaccttctcactgtgtcctcacgtgaccttttctctatgctcatccctggggtctcttcctcttcttgtaaggataccagtcttattggatcaggaccccactcttatgatctcatttaaccttactgtgtctgaagaatctatctccaaatatagtcacattggagggttaggactacatattaatttggggaacggataataattcagtcgatgattcttattctctctctctctctctctctctctctgtctctctctctctctccactgcaggactgacaggcagagaataggaatatgcagctgaaatgtgggcaactctcctgtcagctgaagaggtaataccaggaagggtgtgaaggaaatcctaggtttgggaacagaaagaagttcttgggcagagactccatatgtgatttcctccctcctggttccctggtcatttgtctgtgagatgttcccctcctgtggagagctccaggagctgcttttctcttcttttgccaactgccagcaccccatctgcccagctcatcaaattcctggaagctgcctaaacaagcagtctatatttcataaacctcttgggctccatgcaaaagaaactcactgacgtagctcaggaaaaaataaaatgaacagtttaatataaggacctatgaaatttttcagcaatccataggtgtgagtcagcatttgctttgtaacaaactgcctccccaaaattcactggcttgaaacaacagccatttatttagcttgcaatttcatgggtcatccatttgggctgggctcagctgggtagttctggtctctgccaggctcgctcctgcatctggggtcagttgacagattgcccaggggctgtctggactaggatagcctcatagctgggacaactggcctctccttcatgttgtctctcatcctccagcagggtgacccaagcttgttcacatggcagaggcaggattccaagagtaacagcagaaacttcaaggccccttaagtctcaagctcaaaatggacatgccatcacttctgccacagaaaggacttcattggccaaagttacatgactggccaaattcaagggatggggaagttgactccacctcttgctaagaagggaaaaatctgtggccatttttgcaatctacgaagaaatgtggaagtacacacagctctctctgccagcctcccccacacacacacttcacccccaccccaagcccttacaattcctttcctcctgcatgtggaatttacagttctctgtctctctctgcagatgggtgctttgtacctctctatccacgtggaaaaaaaaacccatcccatagcttccaagtctacaacatctctgttcaagggaacaacccaacgtaaccagactccctttgccctgtttctgaaacacctgaagaaaacatctgatgggttgactcggtgccatccttggtcccatcgccgtgacacgttgtgcaagcaaagcatcagaggctcatccctgtctgtgggagctcagtgctcagaaaacaggggggaggttttaccttggaaattggccagaccccaaaatatgtcttttacacatgctgctttttttttctctttttcaaaaagaaccaaaaaataaattaaaacaccaccacttctgaatggtttctcatgaagcctctcttcctgagagtgggagaggcatgtttgcaaataagatcaacctttgagctttgcactgttcaagtttaatacctctccataggaggatcctgacagatagcaggcacagggcacacaagtatggctgaaactcctctgggggatatatctcacatttgaggaaaattcggtgcttctgtgaccaacacagaaccacctaacatggcattctgcttagcaataatagtagcagaactgagtccaagtcttgtctgttgagggctctccatgtgccagccactgactatttaccttacatgattaatgtgtcatagcaggccaggcgcagtggctcacacctgtaatcccaccactttgggaggccaaggcaggtggctcacctgaggtcaggagttcaagaccagcctggccaacatagtgaaaccccatctctactaaaaatacaaaaattggccggatgtgggggcacatgcctataatcccagctaccggggaggctcaggcaggagaaccacttgaacccaggaggcagaggtttcagtgagccgagatcatggccactgtgctccagcctgggtgagggagtgacagtatctcaaaaataaaataaaataagtaagagatgttagccaggcacggtgactcacgcctgtaatcccagcattttgggaggccaaggcgggcagatcacctgaggtcaggaattcaagaccagcatggcaacatggtgaaaccctgtcccttgttatcacacgaatggggatgtggcttgtgtgctgcctaatcttgcctagaactaggtgtacctgcgttcttttgcttatggctttacccttggttaccctaattccctattctcctgcctcaagaggtgaccacagcagccctgggcctgccctcctagggcttatagtacagtgagggagacagacctgttcccagtgatgacccagagtcatcactctcctctgggaggccaggggggagtcttaatggagactggaggatccaggagggcttcctggtgagggaggggtcagctgtactagagaacaacattaagatcattaataacaagagcagccagatggccgggcacggtggctcacgcctgtaatcccagcactttgggaggtgaggcaggcagatcacgaggtcaggagatcaagaccatcctggctaatacagtgaaaccctgtctctactaaaaatacaaaaaattagctggcgtggtggcaggagcctgtagtcccagctactcgggaggctgaggcagaagaatggcgtgaacccgggaggtggagcttgcagtgagccaagatcgttaccactgcactgcagcctgggcaacagagcgagactccgtctcaaaaaaaaaaataaataaataaaagagcagccaggtcttctggttggagttggtgtttaagaaaaataaaatttaaaaattaaaatttttttggccgggcacagtggctcacagctgtaatcctagcactttgggaggccgaggcagatggattgactgagctgagctcaggagttcaagaccagcctggccaacatggcgaaaccttgtctgctaaaaatgcaaaaaaaattagccaggcgtggtggtgcgggcctgtaatcccagctacttgggaggctgaagcatgagaatcgcttgaacccgggaggcagaggttgcagtgaaccaagattgtgccactgtacttcagcctgggcagcagagcaagactctgccaaaaataaaaaaattttaaaaattgtttaaagagcagccacgtctccatagtggtaattgtcaggcatcgcaccaaagagctttaatgcgttcttctcaaacagtcctcccacttcagcctgccaaagtgctgagatttcaggtttgagccactgtgccatgctatgcccatttttcagataaagaatcataagccccaggagacatcaataataattgctgccatttgttgagcagttaaataaataactttttagaccatatatttcttttttttttttttttttttttgagacagagtctcactctgttgcccagactggaatgcagtggcatgacgttgactcactgtaacctccacctcaagtgattcagcctcccaagtagctgggattacaggtgtgcacgactaccacccagctaatttttgtgtttttagtacagatggggtttcaccatgttggccaggctggtcttgaactcctgacctcaaaagtgtgggggaaagaaagagagatcagactgttactgtgtctatgtagaaaaaggaagacataagaaactccattttgatctgtactaagaaaaattcttctgccttgagatgctgttaatctgtaaccctagccccaaccctgtgctcgcagaaacgtgtgctgtattgactcaaggtttaatggatttagggctgtgcaggatgtgctttggtaaaaatgtgtttgcaggcagtatgcttggtaaaagtcattgccattctccagtctcaagtaaccagggacaccatacactgcggaaggcagcagggacctctgcccaagaaaacctgggtattgtccaagatttcccccactgagacagcctgagagatggcctcgtgggaagggaaagacctgaccgtcccccagcccgacacccataaaaggtctgtgctgaggaggattagtgaaagaggaaggcctctctgcagttgagataagaggagggcatctgtctgctgctcgtccctgggaatggaatatctcggtgtaaaacccgatcgtacattctatttactgagataggagaaaactgccttatggctggaggtgagacacactggcagcaatactgctctttactgcactgagatatttgtgtaaagtcaaacataaatctggcctacgtgcacatccaggcacagctcctttccttaaatttatctatgacaccgagtcctttgctcacgttttcctgctgaccctctccccaccattaccctatagtcctgccacatccccctcaccgagatagtagggatagtgatcaataaatactgagggaactcagagaccagtgccggtgcaggtcctcacttgctgagcaccggtcccctgggcccacttttcttcctctatactttgtctctgtgtcttatttcttttctcagtctctcgtctccaccttgtgagaaatactcagaggtgtggaggggcaggcccccttcaaaatgatccacccacctcagcctcccaaagtgctgggattacaggcatgagccaccatgcccagccacatataacttatttctaaataacttatttaactaacaccacatgattttatgaccccctattttatggatgagaaaaaagaggcaagagaagcgataccagttgcttaggattcccagctaccaattagtggaagcagaatttgaaccaagggagtctctggagccctcgttcccaatctccttttcttcctctccatgtctttctttctccccctgctcccaggcctcctacatcacacccttctggacaaagcttcacatctgacattttcttttttggggtggacagagtcttactctgtcaccgaggctggagggccgtggcgcaatcatggctcatggcagcctcaaactcctgggcttgagggatcctccagcctcagcctcccaagtagctgggactatgggcatgtgccaccacacctggctaattttttaattttttgtagaaatacagggggtgggggcatatctgaaaattttaaaccttccctgactgccgtgagcatttctgggtagaagccactccacgaccttactttgctggcatgagtgctggacagcaatttggcaacatcctctagaccacaaatgtgcatggcctttggcccagcaaatcagcttctgggaataaatatgacagatactgttacatacatgggaaatgccatggacatgatgacccagggaagcacagtttgcaagtacaaaagggctggaaacacccaaaaagcccatcccctgaagacagtttcaaaaatgacggtgcattcatgtaatggaatagtacacatttgtgaatgaatgaatgaggtagctcaatatatctgcctatgggaaaatcaccaagatatgttgctaagtgaaaaacagaaagatacagaataatgctaccattttattttttaatgggagagggaagaataaggaaatggattcatatttgcttaattacacaagcttcctgatgatccttttggatccagaagtttgaaaaccacagcatcaagaggatgcccattgggcatggtggctcacgcctgtaatcccagcactttgggaggctgaggagggtggatcgcctaagttcaggagttcgagaccagcctggccaacatggtgaaaccccatctctactaaaaacacaaaaaaattagctgggtatggtggtgcaggcctgtaattccagctacttgggaggctgaggcgcaagaatcacttaagcctgggaggcggaggctgccgtgagccgagatcacgccattgcactccagcttgggagacagagcaagactgtctcaaaacaaacaaacacacacaaaaaataagatgcccattggagatctccattcactattttatcagatgatatttcagcacttgagtgaagaaaatgtctacaactggtccaaacactcaaggaatttagactcttgacagagaaacacacagaagcaagcagatatgccccgaaccaaacttgctttttcttctaagcctgcttcttcggagcagcctctgaccctccagggccctgagaggagtccctggagccacaggagcttgggagcccagagaagtgggggaatcccagatggtgacagcatcatccagaggaggaacataacgatggccacagattcccaatttggaaataactcagcaaaacaacactgacagaaaattcagagatttccaagagactagcctccctgtttccatttagaaattcacctacatacatccagggtgagagaccccaagcatcagatgtgtcatacacaagcatcagatccaagttagagagggcacccggggacagaaacctccaagccagccaaaagccaaaggaaggattttacagaaagatacaggaatgtggggccaggcacagtggctcatgcctgcaatcctagcactttgggaggccgaggtgggaggatcgcttgcggccaggaattcaaggccagcctgagcaacatagcgagatcctatctctacaacaaatttaaaaactagctgggtgtgatcacatatgcctgtggtcccaactacccaggaggctgaggcaggagttgagcccaggaggtggaggctgcaatgagcaatgatggcgccacttcactccagcctcagtgaaatagtgagaccctgtctaaaaataataataaaaataaaaaacatataaagatgtcagagcacagggaccagagctgttagtcggcctcatggagaccctggccaggacagccacctctggggaccaggaagtctctcagtttctgtctctgagggtttggctctctgagtctctctgtcacctctcatttctctctcatctccctctgtctatgctgtgtctctatctctttcaatctctctgtctctgtctcccagcccttatctctgagtgtgtctgtttctctctcatttctctctctctctctctctctttctctctctctctttctctctctctctttctctctcccccctccctcctcccctctccctactgcaggctggtccataacccttatcttccccagacctgatggagttctggtattaatctgtttatggtctgtttccctccactagaacacggtcttcattaaaggcagagatttttgtctgtcttattttctgctgtatacccagtgcctgggatactggctggatcaataaatatatgctgaatgaagaatgaatgaatgaccattctcatgaacattattatttgatgccaactgtaaagcaacaataataataattgtcactgccactgctgctattgttggtatatcagctttttatttagtacaaactatatccccgaaattgagctaggcagtttcttgtttaagttttacagaccacgctgtgaggtaagtactgttagtatgcccttttttctttctttttgagacagagtctcactctgtcgcccaggctggagtgcagaggcccgatcttggctcactgcaacctctgcctcccgggtacaagtgattttcctgtcttagcctccccagtagctgggattacaggcatgtgccaccatgccggctaatttttgtatttttagtaaagatgggtttttgccatgttggccaggctggtcttgaactcctggacctctggtgatcctcctgcctcggcctcccaaagtgctgggattacaggcgtcagccactgcgcttgctcccccagcccccaaacttttttttttttttttgagacaggtctggctctgccacccaagctgtagtgtagtggcgcaatggtagctcactgaagcctctaactcctgggttcacacagtcctcctgcctcagcctcccaaaatgctggaattcaggcctgagccaccgcgccctactatgcccatttttcagataaagaatctgagggccctcgaggagaaaccacttgcccaacatgagccctggtcttgtctgaccccaaagcccatgggaagtttaggctgcgtggaaggacagcctggtgggctcaggatctgtcccatcacgagttggaacctcagctctgccactcggcaaccgcgagccgttagtaagttgctgaatctctccgtgtgcctccgtttcctcacctggaatgtgggcgacctcacacaggaagccgcctcttctagtgggcaccgacggagcgagcgcgcgtctgcagcgggactgagcgccgggagagacctgcgcaggcgcaggcgcgcgggaagggccagcctgggtggcccaccccgcgcctggcgggactggccgccaactcccctccgctccagtcacttgtctggagcttgaagaagtgggtattccccttcccaccccaggcactggaggagcggccccccggggattccaggacctgagctccgggagctggactcgcagcgaccgcggcagagcgagcgggcgccgggaagcgaggagacgcccgcgggaggcccagctgctcggagcaactggcatggcccgagccatggccgccgcgtggccgctgctgctggtggcgctactggtgctgtcctggccacccccaggaaccggtgagtgacccccgcgcagtccggtggcccctgtctggctcccgctccgcatccaggccgggtacttgcccccttgggttcccgaagatgacggccccgccgcggcgccacccaccccccatctctgccccggggttggaaggaacacggtgcgagggtgcgagggcaggaccctcctcttggccacccggagagcggtcggagttgggtacagaaattcctcgaaattggcagcaacacgggtcgggcacaagaccctcctctgggcccctcggaaaggggatggagttgggtgaggaaatttcccaaaaaggcaagtgaatcccggaaaatcagcagatggtgacgcatgccggattaccttacccaggttcctgctcagcatacccaggccataacccagcagcgtgctggcaggctgggtctggacggaggggatggttgatgttggggaggaggacagtgggtgacacttgacaccattacccctctgacccccaatgtctgactccaggggcctggccattcattcattctttcattctttttttttttttttttgagacagtctcactccattcacccaggctggagtgcagtgtcctgctctcggctcactgcagcctcctcctcccgagttcaagcgattctcctgcttcagcctcccgagtagctcggattacagacatgtgccactatgcctggctaatatttttgtatttttagtagatacaggatttcaccatgttggccaggctggtctcaaactcctgataaatatatatattatatattattattatatattacatattatagtaatatataataaaaatatataatatatattatagtaatatataatatataataaaatatataatatatattatatattatagtaatatataatatataataaaatatataatatatattatagtaatatataatatattataatatattatatatattattataatatataatatgtatattatatattatatatattattataatatataatatgtattatgtattatataattgataatatataataatatatttcttaataaatatatattaaatatattatatatttataacatatattatttatataataaataatatatattttattatacatttaaagagtaaatagataacatattttattatttatttatatattttgtgtatatatatatatatatatatatatatatatagtgcgtgtgtgcgtgtatgtgtgtgtgtgtatgagagagacaaggtcttgctttgttgcccaggctggagtgcagtggtacaatcccggctcattgcaaactcgacttcccaggctcaagcgatcctctcactgtggcttctggagtagctgggattataggtgctcacctggctaattttttttgtatttttggtagagacagggtttcgctatgctgcccaggctggttgcagccaagcacagtggctcatgcctgtaatcccaacactttgggaggctgtggtgggaggatcacttgagcttaggaattcaaaacccgcctgggcaatatggcaagaccccatctctacaaaaataattaactaaataaaaatttaaaaataaaaaagaatgcataggaccatgtttattagtgtcaataagcgctgtcacattttgaggacctactatgtgctagggcccttagcagaaagatttttatataggacctgggggattagaggtcagtctctgaccgcccaagttcaaatcccacctctgccactaaacctctgtatgacttggaggacactatactctgtgtcagtttccctgtctgtaaaatgatgttaacagtagtgcttgcctcaggggggctatttgaggattaaatgccaagatatatgtgaagcacccagaatagcccctgatctgtgtcagcaccctgtgagtgtccactgttctaagtctcattttacaaactaggaaaaagaatcagagaggttaagtaaccggcctgaagctccacagcagaaaactgaagggacccaaaactcctgggctataattgccttcctctcgtgcctcaatcccccacattcttccaaccaggacccacccagagtaataatgcagcgtttcatggatttgaagacccaagatttctccccgttttctacattggggttattctaacccctaatggcaagttgtgctataaatgacaacagtcatggtatgtgaaacctacgacactggtgcgatgaaaaagttctgggccaggtgcggtggctcatacctgtaatcccagcactttgggaggccgtagtgggaggatcacttgaggtcaggagttcaagaccagcctggccaacatggtgaaaccccatctctgctaaaaacaaaaataacaaaaaattagccaggtgtggtggtgggagcctgtcatcccagctacgcggaaagctgaggcaggagaaccgcttgaaccccagaggcagagcttgcagtgagcaaagatcgcgccactgcactccccctgggcgacagagagagactccgtctcaaaaaaaaaagagaagaaaagaaaaagttctggcgctatatagtagtaatgtttgtataatatcgtgaaatgtactatagtgccactgaactgtattttttaaatgacttaaatggtaaatttagttttttaaccacaatatttaccacaattttttaaatcagtgatgttgagatttcagggaaatacggtaataatagaagaaatacggtaataaatagccaaagtgaaggagcacggccaagttgcagaccatcccagacgcccttaccctcctcgcctgccatggccccaactagtgccccagttccccctccccccacaccccacggtccaccggggatccagggccccagcgtgcaagtcgcgccaggtgcccgggctcctggagcccctccctatctagtccaagaacgccccgggtctgacaccttctcttcggttctccgcaggggacgtcgtcgtgcaggcgcccacccaggtgcccggcttcttgggcgactccgtgacgctgccctgctacctacaggtgcccaacatggaggtgacgcatgtgtcacagctgacttgggcgcggcatggtgaatctggcagcatggccgtcttccaccaaacgcagggccccagctattcggagtccaaacggctggaattcgtggcagccagactgggcgcggagctgcggaatgcctcgctgaggatgttcgggttgcgcgtagaggatgaaggcaactacacctgcctgttcgtcacgttcccgcagggcagcaggagcgtggatatctggctccgagtgcttggtgagcagggggttttggggaggctgaatgaaaggcagagacttggtgggaggatcagggaagttggcaaagagcggggaggcctgggagggagggagattccctccacagcagatcccctggggacaaaaggagggggcagcgcaatgatgtggggtggggtggggggaggtgagtggggggaggggctgcagggcaggaagaaagcagagatctcagggagtaaggacccccaagcctgggatcagaaagccctgagggaggaggaggggtatattggaaagggagctgggaggggactgggaaggaagggaggaggcctgggtggcctcttctgggtccctcctttcctcatctgtaaaagggttggtgacaacagcatcacccttggaaagctgtcctgagtgtcatcactgcctaggaaagagtctgtctgcccccttggactgtgtacccatgagggcagaaccggggctattttgatcactgctgggccccagcactttccaccaaacaatatttattgagcacttattatgtgccattctaagagctttacctgcatattctaattgcctgtgattccatcattatcacctgttgacagacaaggaaactgaggcacagacttgcccaagaccaaagctgcagccttagggcagcggcgcttcaccgctggcccatgtgagccccttagagctgtcggttactgttactttatctggtgaagaaggagaaagttgaaacagacagacaggaaagcaaggatcctgatacccaaaagaggaggggatcatgctttcattttcatgagctccatgaagccttcctcttggaacttgagcaagaagtctctgtgcctcagtttcctcatctgtgggatagggatcaccatgaggattcaaaaaaactgaccctttttttttttttgagatagtttagttctgtcgcccaggctggagtgcagtggtgtgatcatagtaggtcctcactgcagcctggaactcctgggctcaagggatgttcctaccctccctgtagctggaattacaggaatgtgccaccatgcccaacttgttttctgttttgttttgttttgttttgttttcttttctttttaagcttatgtgccaagaactattccaagcctgtgcatgagaaactcatgaaatgtcaagggcttggaactgtgcctagcacacaacacccaaccaaaggcagctgttgtcactccagcaagcctgggattctgggtatcatggtttaggatgagggtaaaacagaaacagtgagtcaagttaaggagaaatcttcggtaaataatataggtaatgatggggaaggaagttccaggtttgggaatcaccaggatgatgattaagagatggtcaaggtggttttggagtcagacagactttatgtgaaagcccagctctgctgcttacagctgtgtgaccatgggcaagtcacttcccttctcaacttcagggctcaggcttcctctcctccactgagccccagaccaggataaccccctttgggtttcccctttccagccctgccctctccgagtcatcactgcctaggaaagagtccgtctgcccccttggactgtgtacccatgagggcagaaccagggctattttggtcactgctgggctccagcactttccaccaaacaatatttattgagcgcttattatataccattctaagagctttacctgcatattctcattgcctgtgatcccatcactatcccctgtcaacagacaaggaaactgaggcacagacttgcccaagaccacacagctgctcagggacacagctgggatttaaaccatgccattctgtatcttttttttttttttttttttgaggcagaatctcactctgtcgcccaggctggagagcagtgacacaatctcagctcactgcaacctccgcctcccgagttcaagcaattctctggtctcagcctcccaagtaactgggattactggcgtgtgccaccataccctggctaatttttaatagagacagtttctccatgttggccaggctggtctcgaactcctgaccccaagtgatccacccacctcagccccccaaagttctgggattataggcgtgagccaccccgcccagcaaccatgccatcctgtacccttaatgaatgcccccttctgccacggaggggttcattgaatgacttgttgcttttgttcctcttcccagccaagccccagaacacagctgaggttcagaaggtccagctcactggagagccagtgcccatggcccgctgcgtctccacagggggtcgcccgccagcccaaatcacctggcactcagacctgggcgggatgcccaatacgagccaggtgccagggttcctgtctggcacagtcactgtcaccagcctctggatattggtgccctcaagccaggtggacggcaagaatgtgacctgcaaggtggagcacgagagctttgagaagcctcagctgctgactgtgaacctcaccgtgtactgtgagtgtgcccaagtcagcgatggcaagaacccctgccgggctgcccccaccactgtctacactgactccccaaggcactgtaggcattgcttccatcatctgcaccggctcccctgactcctgtctacacgacccacccccattgtctgcaccagctcccctgggccgtaaacaacactgtccctattgtctacaccagtttacttgggccatagtcaatgctggtacccagactgtctgccctggctcctctagcggctgtctgcacggatacctgacactctgttgactcccttgagcacagtctacactgcccctaaactgcctacacccatttccccaggcaagtatccacaatgaccctccccacattgctacactggttcttctggccacgatcaacactgcctcccttattgtctacacccactcccttgtccttttctttctttcctttttttttttttttttttgaaatagagtctcactctgttacccaggctgcagtacagtggcatgttctcggctcactgtaacctctgcctcccaaattcaggtggttctcctacctcagcctcccaaatagctgggattaaaggtgcacaccaccacacctggctaatttttgtatttttagtagagacagggtttcatcatgttggccaggctggtttcgaactcctgacctcaggtgatcggcctgcctcagcctcccaaagtatgctggaattataggcatgagccactgtgcccggctttttgttttgttttgtttttcctttggacagggtctcgctctgtcacccaggctggagtgtaggggcatgatcatggttcctacagcctcacccttccaggctcaagcaatccttctccctcagcctcccaagtaactgggactacaggtgcagccaccatgcccggctaattttacagtttttttctagagagagttttgctgtgttgcccaggctggtctcaaactcctaggcttaagtgatcctcccgcctcagtctcccgaagtgctgagattacaggcgtgagccactgcacctggccccttgtccattttctacactgccttaccattgtctacactggctctcctgggccacagacagcactaaccccattgtctacaccacctattttggccaccagctgtggggtgttttcactgtctcccatagtgtctacactggctcctatgaccactgtctatgtaaacaccccactttttctacactggttctcctaggcactctctaaagtgccccctgacactgtctacactgactccctggagaactgtctgcattcacctcccacattgtatcgaccagttcccctgagccacgatcaactgtctccgccgggtgctagttgcattgatcttctcacattgtttgtgctggctcccctaagcagtgtctgcagagtcccccagtgtagtctccatgttcctctgcccaatattgtctacactggctcatctacaggctatccagtctcaccccacatcaccacactggcctccttgtgttctgtctgcacagccccctgacagcatctgtcctgattctcctgcacagcgttacctccaccagctccctcatggcatcatcgacattgacacccacacatttatctccactgacagccccaggactctctaaccagtgctgtctaacagaaatagcatgcaagctgcatataggattttaaattctccagcggccaccccattaaaaaattaaaagaaagaggccaggcacggtgtcacgcctgtaatcccagcactttgggaggccgaggcaggtggatcacctgaggtcaggcattcaagaccagcctgatcaatgtggtgaaactctgtcttcactaaaaaatacaaaaattagccaggcacggtggcgggtgcctgtaatcccagctactcgggagactgaggcaggagaatcacttgaacctgggaggcggagattgcaatgagcgagattacgccattgcactccagcctgggcagcagagcaaaactccatctcaaaaacaagaaaagaaagagatgaaatttatttgtttatttatttatctatttatttatttgagacggggtcttactctgtcacccagactggagtgcagtggcacagctccctgcagcctcaacctcctgggcttaagtgatcctcccacctcagcctcagtctcctgagtagctgggactacaggcgtgtgacaccatgcctagctaatttttgtttttgtttttgtttttgtttttttgttttgtgatgaagtcttgctctgtcacccaggctagagtgcagtggcacgatctcaactcactgcagcctccgcctctcgggttcaagtgattctcctgcctcagcctcccgagtagctgggattacaagccctggccacagtgcccagctaatttttgtatttgtggtagagacgggatttcaccatgttggccaggctggtctcaaactcctgacctcgtgatccacccaccttggcctcccaaattgctgggattacagacgtgagccaccgcacccggcctatttttattttttctggagacaggatctccctatgttgcccaggctggtctcaaactcctgggctcaagtgatcctcctgcctcaacctcccaaggtactgggattacaggcatgagccactgtgcctggccaaaattaatttttaataattgcctttacttaacccaatatacctaaaatattatttcaacttgtaattgtttttttaaaattattcttgagatctttcccatttattttgtcctagtaaagcctttgaaatctggtgtgtatttcggcctggctatatttcgagtgctcagtagtcacatgtggccagtaggtgccatattggacagcacagatctagactaagctcccacatcatctacactggctcatccaaatactgtctacacacatacacagagcctgtcttaatttcgtcagctcccggggacacactgtatatgtgggggtgatctcacccccaccaccacattttcaacactggcccgacaatatagcatctgctgtaatattccaacaccctgtctacactgaacccatcagtaatatccacacaagctcttctagacatcattcatactgttcctcccaccattgtctatactgcttactccccgccaggcaattggtacacagattccctcaggtactgtctatactggagtccctcaacactgtcactgggtctgagcgaggaggagatctacactgactcctacccctcgcccccgaataaaaccctgtcccattggcctgcccccaaggacattgaaaggtcttcgctgtcaatcacgtatgggatggctgagcagcagcctagagcagggttatctgggactctttcctgcaggacttgtcagaaccttgaatacactgctgtgtgttgtgagtggtcattgcctatgagtgagaaaaggaggaggcattttcctgcaggacacccaagacatgcctggtccaggctacccaggaaagctagtggagaaaagcagctcctcagaagccttctccatgtccccactgaccaaggactcctaggcttctgctctctgtggcaccccatctacctagactcctcctaggcctctccagctcccgctgttttccaaatatccccgggccttttcctgcagtgtcgtgaatcccgcgtaccccaggccccccaaagcctcccagtctctgaacctctgtatccatttcctgcagaccccccagaggtatccatctctggctatgataacaactggtaccttggccagaatgaggccaccctgacctgcgatgctcgcagcaacccagagcccacaggctataattggagcacgtgagtcctgggtctcagggaggaggggctgggggtctggatttctagcactgagggaggaggggctgggggcctggactcctgggactgagggagaaggggctgggggcggacccctgggtctgagggacgagaggctgggagcccggactcctgggtctgagggaagaggggctgggggtctggacccctgggactgagagaggaggggctgggcctggacccctgggtctgagggaggaggggctggggggtctggacccctgggtctgagggaggagaagctgggagcctggacccctgggtctgaggcaggacagactggggcctggactcctggtctaagagaggagggagattcagaaaagagaaaaagaggaggttgacttcgggcccccagtggggggcatctctgttttgacatctctgttttgcggttgaggcgtttagcaggtggttgaatcctggctggtggatgcacctgctttttggggtgtgcctgctctgtgcccggtacttcccccgaatcccatgtgaccccatgctgtgcacagtcagcagctgttgccctgcccaggttaaagaccagccacgagagggcagaagcggcccttgaatcagcgctcggctccaaagctggtcctccgcctcttggccaagcttgtctaacctgcaggccacatcatttgtaaactttcttaaaacattatgagactttttttttgcgaatttttttagctcattagctattgttagtgttagtgtattttatgtatggcccaggacagttcttcttcttccaatgtggcccggggaagccaaaagattggacacccccactctagactgtaaccacctcaccgtcaccttgtgtaacctacttggttatctctggatggagcaagtactatatatccccattgtctagatgagaaagttgaggctcacagcaataagatttccccagattcacactgaggctgagatcaagagcaaggtaagaaaaaggcaaagagataatacataattttataatacataattttacataaattacataattttactgaaccgccctttttttttaaagaaggggctctgttgccgaggctggagtgcagtggcgtgatcatagctcactgcagcctggacctccctgggctcaggtgatcctcccacctcagcctcctgagtagctgggactacaggcacacgccaccacactcagctaattttgttgtattttttttgcagagacagggttttgccacattgcccaggctggtctgcaactcctgggctcaagcaatcaacccacctcagcctcctaaagtgctgggattacaggcgtgagccacctcgcccagccttaggtctttttccttattacaaaaataacttgtgtccactgtagaaatatcaaacaatttagttatgagcaaaaagaagaaagtagtgcctatagttcaagtgtacccagccacctccagaaatacccagtgaccccttattatacatcctgtcttttttctctctgtttctaaacaaagactggaattatgctgtacatataattttgaaccttttcgtctgtcttgtgaatacctttccatgtcaaagcacatagatccacaactccattttcccccacgttgtattaggaagactgtcaaacatacagaaaaatcataggaattttccagtgaacacttaagattccaccacgtggattcccctgctaacattttactgtgcttgctttatcacgtttctgtgattccttcagtccctctattcatccatcaatcatattatgcatttcagagcacccccagctctcctgctttttttttttttttttttttttttgaggcagggcctcactctgttgctcaggctgtagtgccgtggcacaatcacagctcactgcagccttgaattcctgggctcaagcgatcctccagcttcagcctcccagatagctgggactacaggcacacaccaccacgcctggctaacctggccccttttttagtgttgctgggattccaccactttaaaaaaaaaattcaaagaatagagacaggatctcactatgttgcccaggctggtcttgaactcctgtactcaagcagtcatctcacctgggcctcccaaagggcagggaagggattccaacatatgtggatgtcatcagttatttaaccagtccctagtagaggacacagatgtcattttccattttcaactctgcaaatgccatggtggtgtccatccccactggtcacttgtcagcagttgtccgtggaaggaattgccggtcaaaggttttcaactggtgtgatggtgcctttactgtcctgcctcaaagcaccgcaattcaggctcttgagccagatagctgcgtttgcatcccagctctgcggagcacccaaagcctgatgcttccatctcctccacctctgttcattaaaccagtgttccttgactacttactgtgtgccgggtgcaattaaccaacatacgttggtcgataaaacagaccaaatttcctccccatatagagcttccattctagtggtgaaagaaacaagaagcaagataaagtgtgtagtgtgtgtgcaatggtgataaataccatggagaagacaaagcagagaagggaatgggactgggcgccatgactcatacctgtaatcccagcactttgggaggcagagatgggaggatcacttgaggctaggagttcaagaccagcctggccaacatggcgaaaccccatctctaccaaaaaagatacaaaaattggccgggtgtggtggcatgcacctgtagtcccagctactcaggaggctgaggtgggaagattccatgcacccaggaggtggaggttgcagtgagtcaagatggtgccactgcactccagcctgggtgacagagtgagacgctgtctcaaaaaaataataattaaataaattaaagagaaggggatgggaagggtgatcatcacagttgaaatagggtggccaagtgaggtgttactaaggtgacatcccagcagaggcctgaaggagatgagggtgagctctgcgggtgcctagggggaaagcattccagcagagggaacagcatgggcaaacccatttctatccatcagtccctgcataagcaaacaccctggacacctaactggagagtttgaggaccaacaaagaggccactgtggatgcagaggcgggagcaaaggggagagtaatggaaaacgtgggcagaggtagcaggggccagatcacgtggggcctgtgacaccagaagacttcggtttaactctgagccaggctaggcccccagagggtactgagctgaggtatgggaactgacttagggttcacaggcgacctctggtggccatgtggggaacagacgagggggcgagggcagaaacggagcccagcgtggaggcggctgctgggggccgggatgcacagcgccagagcagggaggtaccgtggaagccctgaggagaggtgggattctggatggatcttaaggcggggccgacatgattggctaatgggttgggtgtgggcatgagaggaagggaagagttggggggcctccagagttgctctccgcttatgctatagagggcgtgagggtttctgggcacgtagtgcgtgctcaatcactgtcactccggacctgcagcagaggccacctcctcacctttctgtctctcccaggaccatgggtcccctgccaccctttgctgtggcccagggcgcccagctcctgatccgtcctgtggacaaaccaatcaacacaactttaatctgcaacgtcaccaatgccctaggagctcgccaggcagaactgaccgtccaggtcaaaggtgaggaactccctgggtgggaagaacagggaccaaaggaagaggtcgaggcagggttccctgtctaatgctctctggctcccatccttctcctaagccttctcacaaaaggaccagtggggccagctttactcccctgttaactccatacctatatcactggtaccgttgttcagctgcctggatacactccctccacacacacaggttgggatagatgtggaatccctctctctcagggactcaggcctttccaaatatattaggcagacctctatcaattgcaattgacagaaacacaaagtagtctaagcaaaaaaaaccaaacaaaacaggactttattgaaaattcaccttcaggtatggttagatccaggggctccaaccttgtaacccaggaacttttattttatacatctcttgtctctgcttttcgttatactggctttattctcaggcaggctctgaagcaagatggccctcggcagggacaggctcacattctaccagaatggcaacagcaggagaaaaaacataccactttcagtaactgtagccatagtcccagggctggctctcattggcccagcttaggccacagcccacctatgaaccaatcatagcagccagggagaatggaatattctgattggccaggcctgtgtcaaagtcccattctgggcaccagagggtgggatccattccacctgaattaaatagactgaggcagtggagtggtggctccctaaggaaattcaagatgccatttcaagaatgagggataaaccccaagagtttccttacctaaatacctgtttccttctctttcagagggacctcccagtgagcactcaggcatatcccgtaacgccatcatcttcctggttctgggaatcctggtttttctgatcctgctggggatcgggatttatttctattggtccaaatgttcccgtgaggtcctttggcactgtcatctgtgtccctcgagtgagcatcaccagagctgccgtaattgagcacctactacgggctctgtgctgagtccttccagtgtgcctctcactgaatcctcaccccactgccatgaggtttcccccatttgactgatgagggtgcagagccagggagccttgttcactggttcattgattacatttacaaatattatttacagagtgggagaagagcgtatagggtcttaatgccatggtagggactttggaatttaattcaggtgatgtgggagtccctgccagatggatggagggtgaaataatgcttaagccctcagccttactccatctgccttgttcaggagtgactcctaggaggaggtggcaggaactggcacctctgatcctcagctctaaaagggtctgatgctttcacacctcaagagatttgcacaggccgttcccctgcctggagcaccctcccatggctccttctggagaagtgtgccagctcattctgtaatcagaggaacgatgctttgctgagcactgtctacatgccactttgtatgtataaccccctcgattttaatttttaattttttttattatttatgtatttatttatttatttttgagacaggctctcactgtcgcccaggctggagtgcagtggtgcgatctcggctcactgtagccttcacctcccaggttcaagcgattctcatgcctcagcctcccaaggagcggggattacaggcacgcactactatgcccagcaatttttgtatttttaggagagacagcgtttcgccatgttggccaggctggtctcaaacccctggtctcctgtgatccacccgcctcagcctcccaaagtgctgggattacaggcatgagccaccacacctggcctgtacaatctccttgaatgcccacaaccacccagcaaagtggttctcccgtgagccccatgttacagaggaggaagtatttgctttgagagatgaagttacctgccaatggtcaaacagctggacatggttgttggggagaagaagccagatctttgactaccaagcttttccttcaaccactaaacaaagctgctcccttacaacccaggcggatactgcctcgtccaggaagccctccctgacccccaagcatgagccaagcatccactaggctctcccactccagccttgcccattctgggtcatcaccgtgggggacttgtttgtcatccccagtggactgtgagccccaagatagcagacctgaggctgtcactgtcatgactgtgccccaggaccgcctaccactgggccgggcataaaagaggcactcgaggaagtgtttgctgagtgattcaatgtgtcagctccagagccagactgcctgtatctgggccctaaagctactgcttgattagtgatgtcaccataggcaaatagcttaagctgtatgactcagtttcctcatctgtaaaatggggtgatggtacctaataatacagtagagcacttaacacagtaggtggcacatggtaagccacatactgagtatgtatttgctatgattgttattgctattattactattattgttattattaacataaactgcacaagagcaggctttttgtttgtttgtttgtgttttgttttgagacaagatcttgctctgttgcccagactggagtagtgcagtgatgtgatcttggctcactgcagcctcaacctcccaggctcaggtgattctcccacctcagcctctcgagtagctgggattataggcgtgcactcccacgcctggctaattttttatatttttagtagagatggagtttcgttgtgttgcccaagctggtctcaaactcctagactccagcaatccgcccacctcagcctcccagagtgctggaattataggtgtgagccaccacgcctggccaagagcaggcatttttatctgttttgttcacagctgtgtccccagcacctagaatgtacctggcacaaagtagacattcaccatttgctgaataatactactatttgctaaataaacccctgttgaatagtctaggaaactgaacacagagaggttaagtcacttgtccaagttcacacagctcctaaaggacagagatggaatttgaacccatccatctggttccagagccaggctcgatatttatggatatttcataaccaagtgaataactggatggctaaatccttagaaagcacaccctccatccctgtctgacacacgtgtataccattaagggaaatggcacccccatgtaatagcagaggcagaacttgacattttcagggccctgacacccaggcatgtcttcttcccatgcttcccagcattattccttcctgacgacttcccctcctatttccccaggtacagagcatgccagcgcctcagctaatggggtaagtgcagtgttggagctaaggagggtgtggggtctgcacgaactacagaccagacgtcttcagatgcccacggcccggcctcaggagcctgggtcttttctcctggtgcctcgagcagcatttcccaacccttcctgctgggcggaatcccctgtagagtttgctaagacgcagccccagacagtctggtctgtgatggggccagggaatctgcattttaatatccgctctctcccccctgccccacgccccttcaattccacccatggccacaccttgagaagcactgccctggcttccagggagagaggaggggacgggcctgcagttctttgcacatggggcttcagtgggaagatgtttgattttgttcaaaagagccccaaggctaaaatttgaaaaccctcttctagcatgtctcctattcagctgtgagcagagagaacagctcttcccaggatccacagacagagggcacaaggtgacagcgtcgggactgagaggggagagagactggagctggcaaggacgtgggcctccagagttggacccgaccccaatggatgaagaccccctccaaagagaccagcctccctccctgtgccagacctcaaaacgacgggggcaggtgcaagttcataggtctccaagaccaccctcctttcatttgctagaaggactcactagactcaggaaagctgttaggctcacagttacagtttattacagtaaaaggacagagattaagatcagcaaagggaggaggtgcacagcacacgttccacgacagatgaggcgacggcttccatctgccctctcccagtggagccatataggcagcacctgattctcacagcaacatgtgacaacatgcaagaagtactgccaatactgccaaccagagcagctcactcgagatctttgtgtccagagttttttgtttgtcttgagacagggtctggctctgttggcagactagagtacagtggtgagatcacagttcattgcagccttgacttctcaacgccaagtcatcctcccacctcagcctcctgagtagctatgactacaggtatgtgccaccacgtctggctaatctttttattatttgtaaagtcgaggtttccctgtgttgcccaggctggtcttgaactcttggctccaagtgatacttctgccttggcctcccaaagtgctgaattaagcagctcaccatccacacggctgacctcatacatcaagccaataccgtgtggcccaagacccccaccataaatcacatcattagcatgaaccacccagagtggcccaagactcccagatcagctaccaggcaggatattccaagggcttagagatgaatgcccaggagctgaggataaagggcccgatctttctttgggcaaggttaagcctttactgcatagcagaccacacagaagggtgtgggccaccagagaattttggtaaaaatttggcctctggccttgagcttctaaatctctgtatccgtcagatctctgtggttacaagaaacagccactgaccctggtcaccagaggctgcaattcaggccgcaagcagctgcctggggggtgtccaaggagcagagaaaactactagatgtgaacttgaagaaggttgtcagctgcagccactttctgccagcatctgcagccactttctgccagcatctgcagccagcaagctgggactggcaggaaataacccacaaaagaagcaaatgcaatttccaacacaagggggaagggatgcagggggaggcagcgctgcagttgctcaggacacgctcctataggaccaagatggatgcgacccaagacccaggaggcccagctgctcagtgcaactgacaagttaaaaaggtctatgatcttgagggcagacagcagaattcctcttataaagaaaactgtttgggaaaatacgttgagggagagaagaccttgggccaagatgctaaatgggaatgcaaagcttgagctgctctgcaagagaaaataagcaggacagaggatttgctctggacagagatggaagagccgggaacagagaagtgtggggaagagataggaaccagcaggatggcaggggcaaagggctcaagggtgaggaggccagtgggaccccacagagttggggagataaaggaacattggttgctttggtggcacgtaagctccttgtctgtctccagcacccagaatctcattaaagcttatttattgtacctccagcggctgtgtgcaatggggtcttttgtggaaatcaaggagcagacaggtttcatgtgtactgtcaccacgtgggatggaaccagaggcatggaagcaagacgctaaatgaagagggccataagggctgggattcccaggcaccttaggaacagcttgtctttttttttttcctctccaaaaaaaatgtttaagggacggtgtctcctgtcacccaggctggagtgcaatggcacgatcatagctcattgcagcctctaactccggggctcaagcaatcctcccacctcagcctaccaagtagctgtgaccacagctgcccctcaccatgctaagctaatttttttaattagatagtacataaacgtcccaaaattagaagataaaaagacatgagggatccattctaatttgtgtttggagtgtaatggtccagctccattcttctgcacatggatatccagttttacacaacactgtgaatgtaatgaatgccactgaatcatacactcaaaaatagctaaaatggcaaattgtctgttatctctttttaaccaccatttttgaaaattaattataccaaaaaaccattgaatagtgcactttatttatttatttatttgtttatttatttatttattttagaaataagagtctcactttgttgcccaggctggagtgcggtggcgtgatcatggctcattgcagcctcgacctgctgggctcgggctatccttccatctcagcctcccgagtagctgggactataggtgggcgccaccccacctggctaaatctctttttaacttttgtagagataggcatctcgctatgttgcctaggctgggctggaactcctgggctcaagtgctcctcctgccttggcctcccaaagcgctaggattacagatgtgagccaccgcgcccaccctgaaccttactttttttgctcagtttctggtaattcagagaatgcctcctgagttgttctacacccacctcatattccatgggagggctgtacagggcttttttaacgaggcctctaaggacaggcatttgtatcctttccagcctttcactattacaatgttgtagtgaataactttacacactgtcatttattttacttttttttttttttattttagagaaaggaatcttgccatcttgcccaggctggtctcaaattcctgggcccaaacaatcctcccgccttggcctcctaaagtactgggatttataggcataagccaccgtgcctggccaatgcacactgtcatttagctcatgttaacacctgagtgtaggacacactcctggaggtggaattgctgggccaaagagtatgtttcttgtcattgtgatagatattgacaaatgaaccctcacagaagttgtgctgagttctgttcccaccagcgacgtaggcgatgacctttttctggagggagggggcatccttggagtccacagagccaggaatggagagtgggcccagaattttggtataggtgttgtataaacttatagtaaggttaagaaaaccgccactatccttatcagagacttggcggggggcagggtatgatggagatcataaggaggctaaaacactccacaccctccctctgcattgctcctgcacaggagtcgggaatcttttcaggttgatacgatctcaccttgaggagctgtgaggtcccagaagcctctgggttgcagattgcttggggtgaaaatgtctgtgctactgaaatctaactttttacaaaaaattacgggctgggcgcagtggctcacgcctgtaatcccagcactttgggaggctgcagcgggtggatcacttgaggtaaggagttcaagaccagaccatagtgaaaccgtgtctctacaaaaaaaattagccaggtgtggtggtgcatgcttgtaatcccagctactcagaaggctgaggtgggagaatcccttgaacccgggaagtggaggctggagtaaaccatgatcgagttactgcactccagcctgggtgacaagagtgagactctgtctccaaaaaaaaaaaaaaaaaaaaaaaaaactggattgcctggctctactccgggcacagcatgcaggcccagttctgctgctctgctgtttgttctgctttcctccacatattggcatcaccctctggtgccaagatggctgctgcattccaggcatcacatccagactcagacccagagaagctgcccatccctacctgggtgagcctttgtaggaacgagaaaccgcatccagcagcagaaacctcacccagcagcgtcttttccggtctcattcaccagcgccgcccaccgctcaaccaatccctggccaaaagaatgggaccgcctggaaggctggaccaaacaggacctgccctctggggctggggagaggcccagatgaaggctgcaggacaggatggactcctagacctctgttaccagcagtgactacctctgtctgggtggttggaacatgtttgaattttattctaagtactgtctacaagttctgcaataaaccttgactcttcttttaataatgcaaaaggaatcgaagtgattgtttgaaagggagaggaagaaagagagagggagggagggaagaatggagggaggcagggaaggagacagagagagtagaatccagccaccggaaaatccagaatagctggctttgcttaatccatgcctggaaataactgctgggtttgcaacaacttctctcccggagacagaccaaggaaactacaaaactgcaggaaggattgaagggccgggcacagtggctcacgcctgtaatcccaacactttgggaggccgaggtggattggatcacctgagatcaggagttcgagaccagcctggccaacatggtgaaacctcgtctctgctagaaatacaaaaataagccgggcgtggtggcgtgcgcctatagtcccagctactcgggaggctgaggcaagagaatcgcttgaacctgggaggtggaggttgcagtgagctgagatcgtgccactgcactccagacttgggcgacagagtgagaatctgtcaggtggattctgagggtactctgaccccacgaacccagcatgaaatcttccaggcattaaggaacattgaggatgtggaggattggaaatccctccagggaaaatacacttctcttgagcagggtcacgaggggtgggggcaatgtgggaggtggggcaaatccaaagacaaggtcaacagcaataataataataacaatgacaggcatttgttgcttgttggctgggcctcttgcatacagttctcccaacatccctgtgaggtggtgatgcttatccccattctccaggggaggaggctgaggcccagagaggtgaagtcgtgtgccacaaaataccccagccatatggtggtagaaccaagttttcagccagactcaccagctcacagcagagctgccctggactctacagccattcagtgtatagctgggccactccatcattcaaggcagttcaacgtcaagattcctgatttgcctcaacctggggcctctagaagataccatcacccccaacaagctgaagacgtgtgtccggaacactcagacacacacaaagtgctatggatacaccacaccccgacctagctgtctcttcctgatggacctcactgggtagaaatgcctggcaccgcctgcctcagatccctaggtcagctctcactccccaatagaagtttctgagatgatgatgaaaacgttctccatctgtgctgtccaatggagtagccactgatcacttgaggctagtgagcacttgaaggtggctagtttgaggaactgcattttttaatgcatttaattttagttactttgaatatatatacacatatatacatttatatatacatattcatacacatacattttacatatattttatatgtatatgtaatatatatataaattatatatgtatatatttttatatataaatatatattatatatttataaatatataaatatataatatatattatatagatatataaatataaatatatattatatatataaatatataatatatattatataaatatatataaattatatatttatatatataatatataaattatataaattatatatatttatatataatatataaatatatataaattatataatttatatattatatataaattatatattttatatataatatatacaatatatataaattatatataatatataaatatatataaattatatataatatataaaatatatataaattatatataatatataaaatatatataaattatataaatctatataaatatatactatattataaatatagtatatatttatatatatttatataatatatttatatagtatatattatatatttatatgtttatgtatatataaatatataatatataaatatatttatatattatatatttatataatattttatataatatgttatatatttttatataatatattatatatatttatatgctatattatatagtatattatatataatatattttatatattatatatatatttatataatatttatatattatatttatataatatgtttatatattattatatttatataatatgtttatatattattatatttatataatatgtttatatattattatatttatataatatgtttataatatatataatatatttatataatatgtttatatattatatatataatatatttatataatatgtttatatattatatatataatatatttatatattattatatatattttataatatataatatatataatataatatatatattatatatattatatatattatatattagttataatataaatatataatatatgtatataattatataattatatacatattatatatgtatataattatataattatatacacatattatatatgtatataattatataattatatacacatattatatatgtatataattatataattatatacatatattatatattataatatattatatattatattatatattataatatgtatatataaatataatatataatataatataatataatatatataatataatatataattatatataatatatattatatataaaataatatatatatattcagtttttttttttggagatggagtcttgctctgttgcccaggccggagtgcagtggcacaatcttggctcactataacctccacctcccaggttcaagtgattctcctgcctcagcctcccgagtagctgggattacaggcatgcgccaccacggccagctaatgtttgcatttttagtagagacagggtttcatcatgttgcccgggctggtcttgaactcctgacctcaagtgatctgcctgcctctgcctcccaaagtgctaggactacaggcatgagccaccacgcctggcctattcagtatatttttttgagacatggtctcactctgtcacccaggctggagtgcagtgtcatgatcaaagttcactgcagccttgacctcccaggttcaacaatcctcctgcctcagccttctgagtaactggaactatagttgaaagccaccaagcctacctaattttttaaatttgttttgtgtaaagttggggtcctactatgttgcccagcctggtctccaattcctaggctcaagcaatcttcccacctcagcctctcagaggggtaggattacaagtgtgggtcacctgtgcctccctaaatttatatttaaatagccacatatgactaatagctatgatattaaacagcataacactagaccctccattatccaagctctgttgatccaaccaacagagcacatttgatctctcctacctcccagcctcacacacacaggccccacaccctccttcctggctccactcacccaagatattgcaacctcctcaatacaccttgatgactatctcagcctccacatccttgcattgctatttatgctgcctggtgcacctcatgctgcctcaccccatcatctgcctcatttctactcttactccaggtctcagctcagatgccccctcccccaggaagccctccctagccgtcaggttgaatgaggtgtgtctccttgggctctcccagactcctgggctcctccatcccagccctgatcactctggatcataattgtgtgagaggggtctgcccccccaaaccctacaggattgtgtgccctactgtggacagagggcagagcagaggtggtctcaatcatcactgtgtcaccaacatcacccagcacacacaactgggcactgggaatgtgtgctggaatgaatggaggatgctttttaaaaactaggctaagccaggtatggtgagtcacatctgtaatcccagtactttgggaggctaaggtgggaggatcacttgagcccaggagttcaacaccagcctggggcaacatagtgagatcccatctctacaaaacatataaaaattgaccagggatggtagcacacaactgtggtcccagctactcaggaggctgagacgggaggattgcttgagcccaggagttggaggctgcagtgagcaatgatcatgcaactatactccagcctgggcaacagagcgagaccctgtcttaaaaaaaaaaaaaaagaataacacacttggaataaacatgatccaaaaaagtacaaaacatacactctggggctgggtgcagtggctcatgcctatactcctagtactttgggaggccgaggcaggaggatcatctgaggtcaggagtttgagaccagcctggccaacatggcaaaaccccatctctactaaaaatacaaaaattagccaggcatggtgacgcatgcctgtaatcccagctactcagaaggctgaggcagaagaatcacttgaacctgggaggcggaggttgcagtaaactgagattgtgccactgtactccagcctgggtgacacagcatctaaaaaagaaaccaatccaaaaactacaaaatattcttgcaattataggtgacatatttaaatggtaagacaaccaatgttcatgaatggaaagacagagcaagaccctgtctcaagaaaaaaaaaaaaaaaaaaaaaaaaaaaaaacaggctgagcgcggtggctcacacctgtaatcccagcactttgggaggccaaggtgggcagatcacctgaggtcaggagttcaagaccagcctgaccaacatggagaaaccctgtctctactaaaactacaaaagtagccgggcgtggtggcgcatgcctgcatttccagctactccctgaggtgggaggatcgcttgaacccaggtggcagaggttgcggtgaactgagattgcgccattgcactccagcctgggcaacaagagcgaaactccatctcaaaagaaaaaaaaagaaaaacacgaggctaagagcttttttttttttttgagacgaagtctcgctctgtcacccaggctggaatgcagtggcgcgatctcggctccctgcaacccctgcctcccaagttcaagtgattctcctgcctcagcctctccagttgctgggattacaggtgcccaccaccacgcctgactaacttttgtatttttagtagagacagggtttcaccatgttggccaggctggtctcaaattcctcacctcgtgatctacccaccttggcctcccaaaatgctgggattacaggcgtgagccaccgcacccagcctgcctcagagccttcaagtgagtcagccacaggtgaaatcccacctctgtctattggcagacttgcctcttttcctgggcctctgtttccacatctgtgcaatgggaacagttatttatggtggctgctgaatgaggcagtgtgtgtttgaacaaacccaggggaattgttcaaacagaggctgttatgactattgctacagtgactgctgttgtagtcacgctgagtgagaaaaagaggttgaagagggtcaggggaggagtcctgggaagttccccagtcaccctgaaaaactggttcaacctctgtctgtgctcccatcccagggagtataggtggagcctccagagcccatggacagggcatgctggggctgggccagccccagcggtgtctctaaggcacccctgggatccccactgagctggcctacttcagacagccagggcccacccctctggcccccttagtgtccagctcgtggccccttggcatttccacaagacgccaagatggagattcccatggggacccagggctgcttctcaaagagcctcctgctctcaggtaaggaggaaatagaccctaaaggccaaggggagaaatggggactcagcccagagattgaagtttcctcttagaagtagggaaagattacctgagaggatgaaattagaataagatgggggaggggcaacagaatcacagcctcattgccattttatctatggaattttctataatgttaggaccatgaaggcaggaatttatgtatgtttggttccctgctatatctccagtgtctagaaattgaaggaagtttagatgtattacatatagttggtattatagcttatatattacatatgcctataagtattggttgaataaatgaatgaatgaatgaattcagagagtccatgtgtttagaagcaggccacacagcatctcaaggtagaaaaacctctggatcaacaggatggcaaatctgtggtaaccatgcctgtgttcccactcctgcacccagggcagacatcactaatcaatcccagcattgtttccaatgagcagcactcagagtccttgctccccgctgaagatctgtatctagagaggagcatgccatggtccctggcaacacccctgatctcagcccttccctgtaacttcccacagcctcaatcctggtcctctggatgctccaaggctcccaggcagctctctacatccagaagattccagagcagcctcaaaagaaccaggaccttctcctgtcagtccagggtgtcccagacaccttccaggacttcaactggtacctgggggaggagacgtacggaggcacgaggctatttacctacatccctgggatacaacggcctcagagggatggcagtgccatgggacagcgagacatcgtgggcttccccaatggttccatgctgctgcgccgcgcccagcctacagacagtggcacctaccaagtagccattaccatcaactctgaatggactatgaaggccaagactgaggtccaggtagctggtaagtgttagggtctggggatgaggtgaggaagctaatgagccctgagcagctaccatgcaccaggtgctgtgcaaacaccatttcatttggtcctctcatttattcacttgacacatattgagcatctactgtgtaccaatccccagagatagtctttaaccctcacatgcattaactaataaaatatctatgaaatgcccgccttgtgcctgacactggagaatgcaccatctcatttacctttcacatgcactaacattaaccaaatttttatcgagcacttactgtatgcctggttgtgaggaatgcatccctcaatctttatgtttataaagcgagtatttactgatgaatccactcggggcaaagtgtgagggaaagggtggtgggcaataatgacagctggcatttcttgggtgatcgttaagagccaggcaccatcttaaacattttccctaaagcatagtttctcagcttcagcactactgatgttttgtattggccagttcttactagtagagggtttgtgcattgcagagatttcagcagcaccccggcctctactcactaggtaccagtagcagcttcctagtcatgccaaccaaaaatgtcttcagatattaccaaatgtctccaccctgggataagaatcacccctggttgagaaccattactctatatttactcatttttaccttaaaacaactccatgaggccagcgccattattgtctccattttacagattgaaaaatggaggcacgcagtggttatgacttgctgagtaaagaatacgaaccagaatgatgtgacatgggaaaggaggtcatcagggagacctcactcaagaagtgaccttagaggagagaccagaagaaggtgattgagggagggaggtgctgtggccccttgccatttccacaggacacagatccccttagaatttatatgttgaaatcctaacctccaagatgatggtattaaaaggtggggcttgggcctggcacggtggcttacacctgtaatcccagcactttggaaggctgaagtgggtggatcacctgaggtcaggagttcgagatcaccctggccaacatggtaaaaccccgtctctgctaaaaatacaaaaattagctgggcatggtggtagatgcctgtaatgccagccacttgggaggcaggagaatcacttgaacccaggaggcagaggttgcagtgaaccgagatcatgccactgcactccagcctgggcaacagagcaagactccatctcaaaaaaaaaaaaagtggggcttgtgggaggtgattagatcatgagggtacagcacttgtaaatagattgtatgcccttatttttttttttttcaatttaaaagcaagattgtggagacagggtcttactgatattgctcaggctggtctcaaactcctggcctcaagcaatccttccaccttggcctcccagtgctgggattacaagaataagccaccatgcccagtctcagctcactgtaacctccacctcctgggctcaagcgatcctcccacctcagcttcccatgtagctgggactgtaggcgcatgccatcacacccagctaattttttttatttattggtagagactgggtttcaccatgttgcccaggctggtctccaactcctgagctcaggcaatccacccacctcggcctcccaaagtgctgggattacaggcgtgagccaccacccctggcccctagttaaattttaaaatgagttttggacagtgaatagaaaaaattttacagaaatggatgaaataggcaaaagtcaactcaacatatgcattaatttgattacacaaatctgcataaaatgacactctagtccggttggagataacagtccttacttcacttgtggagcctgaagtgacttctccccacatttccggggttcccaggtcacaggtgccccctttggaagctgcacagcatggtcattaaggagttcaggtggcctgggtatgatcccagcactgcacttattgtgagccatcaagcaagtcaatttactgttccatgcctcagtttccttatctgtaaaatggcatagagcttacttctttgttggatcattcagagaacagcgtgtgtgtgtgtgtgtgtgtgtgtgtgtgtgtgtgtgtgtatttcaaacttcataacaaccctaagaactaggtattcatattatcctcatttcacagacgaaccaagtcacagagagattgagtaatttgcccaaggccacaccgccagtgggcagcattaggatcccatagtctatgagcttagctgccaagacgggttgggatagaacagatgtccagcttgagagtaaagctgggaggtcagagggtaagagccaggtaggcgtggtcttaattctagcaagtccagtttaagaatcctccaagtcccctacatctcctgcaaaacacagcccagaacctcatccttctgctgaagggattcaggtatcatcaaccgaagtgagaaaaagcaaagcagattgggtctgggctcggtggccacgtctgtaatcccaacactttgggagaccaaggcagtagaactacttgagtccaggaatttgagaccagcctaagtaatttagtgacaccccttctttacaaaaaatttaaaaattagccaggagtggtagtgtgtgcctgtagtcccagctacttgggggactgaggtgggaggatggcttaagccgaggagttggaggctgcagtgaaccgtgatcatgccactgcattccagcctgggcaacagagtgagacgctgtttcaaaaaaagaaaaaaaaaaatcagtttgatggggtagggttggggagcatgtcagcaagcagattttggatgtgctgaggatcgtatgaaatcctagggaagcagcaacatcgagatataggacagctaaggagttccatctgggacatgttgaaattttttttttaatagagatagggtctcactatgttgcccaggctggtcttgaactcctgggctcaagtgatcctcccccatcggcctcccaaattgctgggattacaggtgtgagcaccacgcccagcccgctgggacatgttggattttatgtgccacccagatggttggatactcagatctgaaaagcaggagaaagctctgggctggaaataggaaactgcacctcagttctccatgcagtcactgatatagtcggtgagggactgggggagccctcaggagacatcgcacagtcccccctctctctttctttctctcacccctcagaaaagaataaggagctgcccagtacacacctgcccaccaacgctgggatcctggcggccaccatcattggatctcttgctgccggggcccttctcatcagctgcattgcctatctcctggtgacaaggaactggaggggccagagccacaggtacagggtccccaagtgtccctctcctgtctgctcccactgtcttctcaagccccatggattcttccacaagtcacatcatccggctcatacacaatctcatcaaatcttggaactcctggggtgaaaagaatctttctatcctgtattaaacagaattctgcattgcaagggacagaaaacctattcttaaactgacttaccaaaaagaaggaattttagtcagggtctcgctctgtcacccaggctggagtgcagtggcacaatcacgactcactgcagcctcaacttccccggactcaggtgagtctttcacctcagcctcccaggtagctgagactacaggtgtgcaccaccaagcctggctaattttttttatttttgtagagatggggttttgcccaggctggtctcgaactcctgggctcaagtgatcctccagctttggcctcccaaagtgctgagaatacaggcatgagccactgttccctgcccaaaaaacaaggaattgtttaatactacataacttattcaggtaggctgcatccaggggctcaatgttctcaaatgactcctttatatactcgtcaactctgtatttttcttcggtggcttcattctcaggcaggctctcccctgttgccacaagatcactcccagggggcccaggctcatactccactggtttagccattcctagcaaggagaccaccttgttcctggtagttccaacaagagccccaagtctacctctcattggcttaactcagatcacatgacttttcatgaaccaatcactgtggccaggggttggtggccagggaaagctctgattggccaaagttgggctatttgtgcagccccagagactgggctagatccaactccgtttaatcaagtggattgagagtgtagaccggctctccaaaggaaaacaaaactggttgctattgtcaaagaaggggagtgggcagcagcaggcacagctatcagatgctacctacttgtatggagagagagagagagagagagagaggagagagaggagagagagacagtcctgtttcccccagggagagtctattcgtgaaaaattcctttcttatgacatcagcgtcttcagaactttgtctcttgaaattgattctgaactgattgtagataagatgtctaatttttctgccactcaccagttcccagaatatgaaagcagcaattttgtctcctttctcaactcttccttatgtgccatggattctgttttcttcttcttcttttttttttttgagacagagtcttgctgcagtgtagtggcgcaatcttggctcactgcaacctccacctccgggactcaagcaattctcgtgcctcagcctcccaagtagctgagactacaggcgtgcaccacaacgcccggctaattttttgtattttagtagagatggggtttcaccatgttgccctggatggtctcaaactcctgatctcaggcaatccgccagcctcggcctcccaaagtgctggaattacaggcatgagccactgcgcctggcctatttctttttcttttttaaagagacagggtcttgctttatcacccaggctggagtgcagtggcatgatcatagtttactgcagcctcagactcctgggctcaagtgatcctcccacctcagcctcctgggtaactgggaccacaggcctgtgctaccacacctggctaattatctgtattattattttttgtagagatggggtcttgctatgttgcccaagctgacctcaaactcctggccttaagcggtccttctgcctcagcctcccaaagtgctcgaattacaggcatgcatcaccatgcctagcttattttttactttttgtaaaaataagatctccctgtgttgccctggctgtcttgaattgctgggctcaagccatcctcccatctcagccccccaagtagctgggactacaggagtgcaccatttccaagcttttttttcttcttcttcttgttttgctcttgtcgcccaggctggaatccagtggcgcgatctcggctcactgcaacttccgcctcaggggttcaagcgattttcctgcctcagcttcctgagtagctggaattacaggcacccaccacctcgcctggctaatttttgtatttttagtagagacggggtttcaccatgttggccaggatggtctcaaactcctgaactcaggtgatctgcccaccttggcctcccaaagtgttgggattacaggcatgagccactgagcccaattactatttttttactcaaaaccgcacacacaccttccaccccctcccccctctccattttccttcatagggaaggatgttgctctctgatattctactgtcaatgctttattccaattttcttcccctctctttccaccctagactgcctgctccgaggggccagggatctctgtccatcttgtgctcggctgtatccccagtgccttcagtgacgcccagcacatggttggtgcttgtaaatacttatttagtgaactaacaaacttgctatagcggtgtcaagagtacttttgttttcagagtcaaagtctcactctgttgccaaggttggggtgcagtggtgcgatcgtagctcaccgtagcctcgacctccctggttcaaactatcctcccacccgagtctcccaagtagctgggaccccaggtgtgcaccaccacacctggctaatttttgtaatttttgtagagacgggatctcactttgtgagtcaggcaggtctcaaactcctggcctcaaaaaagtctcctaccttggtctcccaatgtgctgggagtatagtcatgagccatttcacttggttccagtgtacttttaaaattaagggtattcaggacgggtgcagtggctcatgcctgtaatcccagcactttgggaggccaaggcaggtggatcacttgaggtcaggagttcgagaccaacctgatgaacatggtgaaaccctgtctctactaataatacaaaattagcagagcatgggccaggcatggtgcctcacgcctgtaatcccagcactttgggaggccgaggctggcggatcacgaggtcaggaaatcgagaccatcctggctaacacggtgaaaccccgtctctactaaaaatacaaaaaattagccgggcatggtggcaggtgcctgtagtcccagctactcgggaggctgaggcaggagaatggcatgaacccgggaggcggagcttttagtgagccgagattgcaccactgcactccagcctgggcgacagagcgagactctgtctcaaaaaaaaaaattaaaataaaataaaataaaataagccgagcatggtggcacacacctgtaatcccagctacttgggaggctgaggcaggagaatcgcttgaacccaggaggcggaggttgcagtgagctgagatcacgccattgcactccagcctgggcaacagagcgagactctgtctcaaaaaattaaaaaataaaaaataaataagggtattcaaatgaatctatgtaaagagaaatattaaggaaatcataagacaggtggatgaagcaggatcatttaggtgatctctgtaaatggtgatgtctggggaacactattcattggcataaggtggtggctagggaaactgagggattgcggatgaggattatggaagaaaagtctgggatagttcaggcctcatcctagctcactctgaaggagagaccatgtggctttcagggacctggtgggatttccagcttctcttaagtctctctccccccgcctgagtgtctctctatcctaatatcaattccctctatgtgtccccaggatggcgaccacagagaagccagaattgggccctgctcatgatgctggtaaggcgggagccccagatctcactacctagccctcctctcagctcctcctttctcccctatagccacaagcccgcttattctccctcactcagagacctcccaatgcacctgccccgagacctctctggggccccctgaactcacccacataatctgagcgcatcggcacccaccccaaacctgctttttctcttcttctcagtggctagcatccccatcccatcatgcaagtggatcccatccacctccacaggccactaccagcctcctagaccccccacacccagctcctcactggtctcccagcctccagacccctccaacccatcccaggacaaggtctttctaaaattctgatcatgttactcctctgctcaaaggccctccatggctcccctgtgcccttgggacaaagtttagtctccttaacatggttctcaaggcccttcacaagacagatcaaacacagtttctgaaacacagctggctctctcaccagacctctgcactcaccctctcctgccttagcttcactcacttctctctactatctcagatgccccctcctccaggaagccctcactgagtcctaggctacttaggcaccccgtcttgggctcccacccgcccccagtcccccgactccagccctaaacactccaggttgtcactctggagactggtctgcgtcccccactggactgtaagtcctggaagggcaggcctgggactgtcgtggtcagcactgtgtccccagcactgggtttggctagaagaagcgtttgcacaaatgttagttgaataaataaataaatgaatgtcaacaggcagtcagagtggcctgtggggcccatgtgtcagctggtacctcccctggcctctgtttcaggtgacaacaacatctatgaagtgatgccctctccagtcctcctggtgtcccccatcagtgacacaaggtccataaacccagcccgggtgagtcccgtccccagcctctcccctgaagccaatgctaacaggcgcctcctctctgagctggctgtggtcctctgggccatcttgacaccaggtttgggaatctcaactctctatatattgttccctgtttttaaaaatcctaaggaaaagagactggaaggaaacagcacaacagaagcagcatttgtctccggggtgtggaggctggtgggtgggttttatcttcttttcttttatacttgtctgtgttttctgcactgagcagccactacctttataatggggaggttttatatatatataacgaaaggtttataaaaatgagtcatttaggctgggcgtggtggctcacgcctataattctagcactttgggaagccaaggtgggtggatcacctgaggtcaggagtttgagaccagcctggccaacatggtgaaaccccgtctctactaaaaatacaaaaattagccaggtgtgatggcacatgcctgtaatcccagttactcgggaggctgaggaaggagaatcgcttgaacccaggaggtggaggttgcagtaagccgaggtcatgccactgcactccagcctgcacgacaggagcgagactccatcccaaaaaaaaaaaaagttatttagattaaataaaaagagaaacttagctgggcatgatggctctacacctgtaaatcccaacactttgggaggccaaggtgggaggattgcttgaggccgggagtttgagaccagcctggggaacatagctagaccccatctctacaaaaatttagctaggcatggtggtgtgcacctatagtcacagctaccagggaggctgaggagggaggatcacttgagcccaggagtttgaggctgcagcgagtggtgattgcacaactgcactctggcctgggtgacagagcaagatcctgtctttttctaaaaaagtgaaaaataagagaaacataaaacactaaggctaagagcttagaaccagaggtgttgacaggggtagactgagagttaatggagtggttgacgggccactggataccacacgaagctggggcccagtgcccatttgtcagaggagaacactgaggtgtaaggaagctaatcccctctgcccaggggcctcacagtctgggaggggtgatggggacttggaatctgagactgtcctagcaccaaaggtcaaagtttagagggtggggggtgccgagcgcccactcacccgtgtccttcccttgcagcccctgcccacacccccacacctgcaggcggagccagagaaccaccagtaccaggtatggagctgggagctgggaggggtggtggggatcccacggatccaggagccccgaagccggggtggggaggggtcaagacaactgaaactgggggctttcctcccctcgtccccccaagcctcacggtctctgctctcgaagaagcccaaaccgcctccctgagagaccctggcaagtcccttttcctcccaaggctgcaatttccttctttgcaaaagggatccaaaaccttgaacttgcacaggaggaacaaggcccagagagggacaggggattgcctggggccacacagccagtcaggtccccagtgaaaccccaccgcagagctcagtccctctccatcccctcctgtcagctgtctgtccctgtagttctgtctctctctctcagtggcctacatatgtctgtatgtctgtcttcccctttcttggactctctctctctctctctctctctctctcagtttctcttgctgtgtcctttttaatctgtctttctgtttccagtttgttcatgctgccttgtctaagatgcatctctttacatgtcttcgtttctctgcatctctgtctctctctctctccattctctgtctctcctgcctctttgtctctgtcactgtgtccacctcatttcttggctcttccaggacctcttgtctctgcatctcactctctttccaccttgctcttccattctctctgcgggtttctctccatctcacgctgtctctcatcctctgtccctctctgtctccccaagactctccccctccacccagtcataattctgttctctcttccccccaagcaggacctgctaaaccccgaccctgccccctactgccagctggtgccaacttcctgatgggtcctgggccaggccagccagggagaagacaaggccccagccctcctctgggagcctcacacctgagaccagcaggacaaggccattgggggctgtggggccgatgaggtggactcagccaaagactcagcagcacatggggcaggtgtcctggcagggggacaggagactgtaacaggcccaggtccttgtgcagcccgtgaatgcacgcccgccttcggtctgttccttcaagcaagctggcctgggccatgtgcctgtgaaaggcaggctctggcccctttccatgccaaagtcccccaagatctggatatctggggacaagatggtggcctcaggcctgcctcccaggcagttggctgggctcccaactgtctgtcctcaatgccctaccccaactccactagtgaccctcagagtcttctccccttaggacaaggcagacaccccaccatgcgggcctcaggtggcagagaggcccagcctcacaggcctgtggccccacacaccagtcccagcaaggtgaccacggctgctggaccccttccctgttcaggcaggcccagcccctctcagaacctgctgccagctgctggtcttggcccccaccctgaatcttactgagtccctctgggcagcagctcccttctccaccccaccccagcacccgtcccaaatgtggcctcagcttgtcctccccttccccaaactatgcattcattcagcaataaatgagcctttgctgtatgccagacccagttctaggctcttgcagccctggtagaaagcaaaacaaaaactcccgctttcccagagggtcacttggcaggggaaagaatcaggaaataaaataaataatgaacatgcgttgtctgtcagatggggataagtgtattggggaaatggaggggggtcgagagtattgggggactgagatttttaattagggcacagaggtcctcgctgagaaggtgacaaatgagcaaagacttgtaggaggggaagaaaggagccatgtggggctctggaggaagagcattccagacagagggaatagccagtgcaaaggccctggggcagaagcatgcctggcatattcaaggagcagcaagggggctgggcatggtggctcacacctataatcccagcactttgggaagccaaggcaagcagatcatttgaggtcaggggttcaagaccagcctggccaacatggtgaaaccccttctctattaaaaatacaaaaattagccgggcatggtggtgggcacctgtaatcccagcaactggggaggctgaggcaggaaaatcacttgaacccgggaggcggagtttgcagtgggccaagatcgtgcccctgcactccagcctgggtgacagagcaagactccacctcaaaaaaaaaaaaaaaaaaggagcagcaaggaggccagtgtggtggagagggtggggaaggaggaaaaggtgggtggaagttgacgtcaggagatggacggaggggcacatggcgcagggccaggtaaggcactgccgagactgtggctttgaggggcagggtgctgtgaaaggcgaataacggccccccagtgacgtctacatcctaatcccctgtgaatgttacgttatatgacaaaagaatgcagccatgattaagttcaggatcgtgctttggggagattatcctggattgccctggcaggctctttatgtaatcacacagatccttataatcgagaaggacacaggaagcgtgagtcagaggggctgtgacaacaaaggaagcaaagccctttgaagacgggagaaggagctgaaagtcaagcagcacttcagagtcagaatgattgagtgtgagagagtccatgggccatcgtgagtgttgaagacggaagggggccttgagctaaggaatgcaagaaacttctagaagctggaggagggccaagctcagtggctcacgcctgcagtcccagcactttgggaggccaaggtgggaggatcgcttgaggccaggagttggagaccagcctgggcaacatagcaagaccccgtctctacaaaaaaaaaaaaaaaaaaaaacagaaccgagggtggtggctcatgcctggaatcccagcactttgggaggccgagacagggggatcacctgaggtcaggagttcaagaatcagcctggccaagatggggaaaccccgtctctaccaaacatagaaaaattagccaggcgtggtggcgggtgcctgtaatgccagctactggagaggcagaggcaggagaatcgcttgaacccaggaggcggaggttgcagtgagccaaggttgcaccattgcactccagcctgggtgacagagcgagactctgtcttaaaaaaaaaaaaaaaatcagaattgaggaaaggcaagaaaatggattttcttcctacaacctccagaaagcaacacagtcccgctgaaaccttggctttagtgcagtgagacccattttggattcttgacctccagaactataagataacaaacttgtgttgttttaagccactaaatttgtggcaattttttacaggaaatgggaaactaatctagaggatgaggaagaaatcacagaaggagaagttgcgtctcatgctgactcagtatgcaaatactctctgggagacttctccatcctcagaccgctccagacaccaaatgcctgggcctttgaccgccttgctaagagggtcaaccaagccagccaggtagccagggctcagggctaggagtgtgaggggattccatcttttctctctctttttttttttttcttttttgagacttttcttttttgagtcttgctctgtcgccgaggctggagtgcagtggtgcgatctcagctcactacaacctacgcctcccaggctcaagcaattctcctgcctcagcctaccaagtagctgaactacaggtgcacaccacctcacccggctacttttttttttttttttgtattttcagtagagacaagtttcaccatgctggccaggctggtctcaaactcctggctctgcagacaggaggactgaaatccatggtggcagacgcctataatcccagaactttgggagaccaaggcagacggattacttgaggtaggagttcaaggccagcctggccaacatgctgaaatacagtctctactaaaaatacaaaaattagccgggagtggtggtaggttgagacaggagaatcgcttgaatccgggaggcagaggttgcattcagccgaggtcatgccactgcactccagcctgggcaacagagcaacactctagaacaaaacattgacagaatttgtttctggtttggatacaggggattggagagaagagtgtgccaataattggtttgttcatcaattcaatgaagatttattgagcatctgttgtggacagccctattctaggttctggggagacagccatgaatgagacagtgatggctgcttttggagagctgaccttctagtgggagacaggccacagaaaaacaaagcacatggaacataatgtcagggatgacgatgctgtgaaggaatggagcaggtgctaagaacctactggaacgggcatgcttaagaggtgctggagagggtcaactcttgggtgactgcttcgagcaatgggagggtggggagcaggggtgttgtacacactgcgacagggccaggtttgcaaaagaaatcaagacatggccacacaaacacttctgtgtgactgttcacagcagcattattcacaatagccaaaaggtagaaataacccaaatgcccatgaacagacgaatgagttcttttgtttatttgttttgttttgtttttgtttttgagacagtcttactctgctgcccagactggagtgcaatggcgcaatcttggctcactgcaacctccacctcctgggttcaagccattctccttcctcagcctccggagtagctgggactacaggcgcccaccaccacgcttggctaagtttttgtatttttagtagagatggggtttcactgtattagccaggatggtctcgatcgcctgacctcgtgatccgcccaactcggcctcccaaagtgctgggattacaagcgtgagccaccgcgcccggcacggtatttttactgtatcttttctatgtttaggtacacgaatatttatcattgtgctacaattgcctacagttttcaatgtagccacaggctatgcaagtttgtcacctaggagcaatagcctgtacctataccctagatgtgtagcgggctctaccatctaggtttgtgtaaacacattctgtgatgttcacacaacaatgaaatcgcctaaagactcatttctcagaacatatcctcatcatgaagtgacgcatggctgtattatccagtggaacattattcagccatgaaaagaaatgaagccctgacacatactgcagcaaggatgaccctgaaaacgctgtgctaagtgaaagaagccagacgcaaaggactccatatggtagggtcccattgctatgaaatgcccaggcaattcatcaagacagaaagtggatgtagtagttgttgggttgggaggaagggcggaatggggaagtgactgctcatggatacaagctttctcttaggggtgataggatgttctcaatgttttgtttgtttgttttcttttgttttgttttgttttttgagatggagtcttgctctttcacccaggctggcatgatctcggctcactgcaacctccgcctcccgggttcaagcgattctcctgcctcagcctcccgagtagctgacatcacaggtgtatgccaccacacctggctaatttttgtatttttagtagagacagggtttcaccatgttggccaggctggtctcgaactcctgagctcaggcaatccgcccacctcagcctcccaaaatgctgggattacaggcatgagccacggcatctagccatgttctcaaattgattgtaacgatggctgcacaactctgtgaatttactaaaagctattgaattgtacactttattttggttttgttttcattttaagagacggggtcttgctctctcgcccaggctggagtgcagtggttacgatctgggctcattgcagcctcaacctcctgggctcaagtgatcctccttcctcagactcctgagtagctaggattacaggcgtgcaccaccacgcccggctaatttttgtatttggcagagacggggtttcactgtattgtccaggctggtctcgaactcctgacctcaagtgatctgcctgccttggcctcccaaagtgctgggattacaggtgtgagccatggcactcagcccgcattgtatactttacatggatgaattgtgtggtatgtgaattacaccgcaaaaccgtttaaaaaagaagaaagggtggagcctttctgaacctattctggttcagaggctgccagattcgcaaaatattttttaaaagaaagagagaaatggggtgggggagggaggaggagtgtgggggggaagaggtggagaaagaaaagaaagagaaaaaaaagaaagagagaaagcaagcggggaggaaaagagggagcgagggagtggggagagaaagcaggcgggtttgagaggtcagtactgagtcggcaggaggggatagctggagaccggggtcggggtgtgtgagtggggacagtgaacataagtgcatcttgtagcacctgattcattgtcactccagaaatgtcaccttctttcactgtttggggtttgtgcttattgggtcgtcactattgccagacttgctgcaagagagggtcagccctgagccagcagggggcagcagagcaccacacagatcatgcacaagcgctgcagctaccttgagcccccccatgcgcccaccccgtctctgcccctttctttacccctctgggaacccagagagtctatccagctctccaaccccaaacctggacacctccctccccactctcacggcaggcaccaggccctgccctccaggcctcttgaacttggccttccccagtacctgcagcccagccctgggccaggcagcttctctcccctccctgccccagcctcccgcctggactcctccccactcccattctcctaccacagagcagcccaagggatctttctaaagcccaaactcaacctagccccttcctgctcaaaaccatccatggctccccagtgccttagagtccaagctcctcaccactgcctccaacgcctgcaaagtccaggggacgctcagtctcatctctcagcacccaccgccctctcaccttcacccctggtctacagtcccccagatttaacttctttctgtttccccacacactgtgttccatctcacttccaggcccttgcacacccccaggcacacagctccactcttcctgcccaccccattcaccctccaagtctcaactcatacacctcctcctccaggaagccctccttgacctccaagctgggtcagatctctcctgtgagctcacctaccccagccccgcccagtctgggccatcactgcctggggatgggtctgtcccgctgaactatgagccctataagcacaattgctatctccatcactgaggggctcccagcactgaccagcacaaggcagaggcccaaggagtgtggatgctcattatacacatccttccctttcccaacctagcagtccccattcattcattgacaaacgtctgttgagcaactactatcaccaaactctgttacatgaacttgactggcatgagagaggtgaagataaaccagcccagctcctactctcagggagcttgaggtctagtaggggagatgacctggaactcaatgtaataataataattaataataaacattaccgagcacttattatacgccatgcactatgctaagggctttacatttattcactgatatcctcacaacggttctgtgagtgaagttataccattgaaagtaatggcaaagccaggcgcagtggctcactcctgtaatcccagcactttgggaggccgaggcgggcagatcacctgaggtcaggagttcgagaccagcctaaccaagatggagaaaccctgtctctactaaaaattagctgggcatggtggtgcatgcctgtaatcccagctacttgggaggctgacgcaagaaaatcgcttgaacccaggaggcggaggttgcggtgagctaagatcgcgccattgcactccagcctgggcaacaagagtgaaactctgtctcaaaaaaaaaagtaatggcaaattggctgggcgcaatggctcactcctgtaatctcagcactttgggagaccgaggcgggcaaatcacaaggtcaggagtttgagatcagcctggccaacatggtgaaacccatctctactaaaaatacaaaaaattagctgggtgtggtggcaggcgcctgtaatcctagctactcaggagcctgaggcagaagaatcgcttgaaccagggaggcagaggttgcagtgagccgatattgtgccactgccctccagcctgtgggacagagcaagactccgtctcaaaaaaaaaaaaaaaagtaatggcaaaagccacaattacttttgcaccaacctagtactgtgattatccccattttacagatgaggaaactgaggttaagtaagtgaagctgaccaggcaaagtggcttatgcttttaatcccaggactttaggaggcaaaggcagaaggaccgcttgagctcagaagtccaagatgagcctgggtaacagcgagacccagtctgcacacacaaaaaaatttatttatttactttcatttatttatttatttatttattttgagatggagcctctccctgtcacccaggctggagtgcggtggcacgatctcggctcactgcaacctttgcctcctgggttcaagcgatttctggcttatttttgtatttttagtagagacgggggttttaccacgttggccacgctggtcttgaactcctgacctcaagtgatccacccacctcggcctctcaaagtgctgggattactggcgtgaattaccgcactgggccaaaaatatttaaaaattagccaggcgtggtggtgtgtgcctgtggtcccagctacctgggagactggggtggaaggactgcttaaccccaagaggtcaaggctgcggtgagctgtgattgtgccaccacactccagcctgggcgacagagcgagactctgtctcaaaaaaaaaaaaaaaggtgaggtcacccagggtatcagtggacaagctgagaacaaaaccaaagtttctaacaccgaaaatttgtcttctgctcatcccagcctgaaaggaaggtgaaccaagatgcaatccatgcccattcaagtggggtctgtgtgtccaggcagaggtgtctgccctctacaaagggcacaggggagagagtgatgcttaacccaaaggaggtctcgctgatggtggaatttcaggcaccgtgtttatgtttggcctaattagcttgagaccagtgtccttgacgggaactaagacgccccccacgcccatccccggctcccaggctctctccacccaagttctgcccaccagggcacactgcttccctctgccacctcctcttcccacgagccctggtacaccctagattctcagggctgtggctccttgctttacaaatgagtaagttggtggcagggaaggaagtgggctgggccatgaccaagagtcactatgattcacggggaaaaccctgccctcccgattcaactctgtgtgcaaaaaggttttgtgcgggttcctagggtctcagggtcaatggatgtagatagaccactagaggtatacacagccactgtccaccaactctcccaccccccgggtctgcctacagccctggatggggatcctgtaccgggggggcggttggggggttggacaggtgtgggttgaggtgttgtttacatgttgaacacactggggttccaggtaagtttccgtcagaagaaagcacttcactgctgaggcagaaatttcaaaatattgaaccacttttcgatcctggcagaagggaattttcccagggtgataaaagtgttttaaaattagatttgagtgatggctgcccaaaaggaattatgatattattcaagaaatcatggctttgctgaacaacagaaaactcgaacactgagcatttgaagatattaaggaattgttgatttttatgttcactgtttaggtgaaatgatagcattgtgagtgtgttatttttaaatgagtccttatcttttaaagatacaggcagaaatagctataaaatgatctgatggctgggatttgctttcaaataatacaggagagggccgtgggtgaggagagggaaccagattgcctatgagctgagtgatgggtatgtggttgcgagggcagacaccattcttctctctgctttcgatgggtgcgtagaatttcccataataaaaagtggtttttaaattgttttgaccattggcctcgcgcggtggctcacgcctataatcccagcactttgggaggcagaggcaggcagatcacttgagggcaggagttcgagaccagcctgggcaacctggtgaaaccccatctctattgaaaacacataaaaattacccgagtatagtggcatgcgcctgtaatcccagccactcgagaagctgaggcaggagaatcgcttgaacccgggaggcagaggttgcagtgagctgaggtcgtgccactgcactccagcctgggcaacagagcgagactccatctcaaaaaagaaaaaaaaaattgttttaaccattctaaaggaatgagaaaagaattctacaacttttgtttttttgtttttttttttgagacagagtctcactctgtcccccaggctggagtgcagtagcgtgatcacaacttactgcagcttccatctcctgggctcaagtgatcctcctgcctcagcctccagagtagctggaattacaggcatgtgccaccatacctggctaatttttttttttttttttttgagatgaagtttcactcttgttgcccaggctggagtgcaatggcgggatcttggctcactgcaacctctgcctcctgggttcaagcgattctcctgcctcagcctccccagtcgctgggattacaggcatgcgccaccatgcccagctaattttgtatttttagtagagacggggtttctccatgttggtcaggctggtctcgaactcccgacctcagatgatctgcccgcctcagcctcccaaagtgctgggattataggtgtgagccactgtgcccagcctttctttttattttatttttagtagagatgggactcactatgttgccctggctggtctgaaactcctgggctcaagcaatcctcacacctcagcctcccaaaatgctggggttacaggagtgaggcaccatgcccaacccaggcctaaccataattctaaatccaagtccaaccccttcccactttcctgaagggaaaaatgaggtgcagagagaggaaggaacccctaaccaggtccctttagggtcccaagagaaccctggcactctctgctggcctccatccccctaactctgcccttcacttcctcccctccagcaccttccagaaaagctctaggtggctagtccccctctgaccaccttctcccactttcccctgcccctcactcagctccagtcacaccaggctccctgctgtccttatgctcatcaaagcccctcctgccccagggccttgaattcacttgttgtaccttctaccaaaaacactctcctcccacacacccacaggctccctcctctgtcgcctccttcaggccagaaaaagcgccaccaccaccacctcccaaactaaaacagcaacccctgctcctctctatccacttgccctattttatttaattttatttattttgagacacaatctcacactgttgcccaggctggaatgcagtggtgcaatctcagttcactgcaatctccacctcttaggctcaagcaattctcccaccttagcctcccaagtagctggaattactggtgcacaccaccaccacgcctggctaattattgtacttttttgtagagataggatctcactgtggtgcccaggctggtctcaaacgcctggcctaagcgatccacccaccttggcctcccaaagtgctgggattacaggcgtgagcccctgcacctgacctattttactttttatagcttttatctctgcctgacattaaatgccatatcaggttttttttattattattattgcccatctccctccaataggatttagcccaacaaaggaaaggatgtctctgtgcaaacagcctggtacatagtccatgcttgacaaatatttgttaaatgattgaatggcttggaaaaacccagatgaatgaggtgaggagggtggggacgggtatccaagcacagggaacagcctatggaaaggtctggagcttctccgatccacctgcctcctctcctgcatggaagcctaggtgctttttttttctgagacagagtctcactctgtcacccaggctggagtgcagtggtgtgatctcggctcacagcaacctctgacttccgggcttaagtgattctcctgcctcagcctcctaagtgtctgggattacaggtgcccaccaccacaccgggctaattttgtattttttttagtagaggtggggtttctccatgtcggtcaggctggtctcgaactcccgacctcaggtgatccacccgcctcggcctcccaaagtgctgggattataggcgtgagccaccacgcctggccacctgggtgttctttctagggtcaggaattaaggggacatttggtcctttctccccaagaacaacctctccaggcccagccagagccaactccaggccttgacaggccggcacaggaagccacaccctgagcaaatatgacggccccctctgcctcgcccaagataaggggaggttgaaaggggtttggaaacctgcttcagcctaagacattagctccagccaaaccctcagtctcaaggcctccccacccctgcccagagaggacaggacaaggattctgccacggaggcccaagtctgacgtttacatctaatatatattgatgatgtcagtggtgggcagggtcttgaagagcagataaaggagttcccagcctccctcccgctcccaagggaactaagtgactggtgagacaagagggctgggcgggcaaggggtgaccctgaccaaacaaggtcatagacccgtgtccccagatggctgtgcagagaagataagactcatctgctccaatcttatgaggcaatggcccggggcctcagtttacttgtctgcaaaatgggttttcttgggggtgggcagcggggagatggataacaggaaaagctgaagctgtcaaaaagaataatgggccaggcacggtggctcacacctgtaatcccagcactttgagaggccaaggcaggtggatcacttgaggttaggagtttgagaccagcctggccaacatgtcaaaaccctgtctgtactaaaaatattaaaattagccaggcatggtggcgcatgcttgtaatcccagctactcgggaggctgaggtgagagaatcgcttgaacctgggaggtggaggttgcagtgagccaagatcgcaccactgcactccagcctggatgacagatcaagactccatttaaaaaagaagaagaagaagaagaagaagaagaatgatatcagcagaatacatctacaagctgaccacttctcccatccctggttcagccgccactacctcctgcctggtccagcactacccaacaggagcaagagtggagccgcaaacacaattcaaccttttccagcctcatctcatgaagaaaggtgaaacgaatgtatttaacacaacatatgcaaaatgtcatttcagcacagaatcaatataaaaaactgattatctgttttacattattgtgtatgcatgcgctcttttttttttttttttttcttaatgagacaacaaggtcttgctctgtcgcccaggctggagtgcagtggtgagatcacagctcactgcagactcaacctcctgggctcaggcgatcctcctacctcagcctgccaaatagctgggactacaggcgtgcaacaccactcctggctcatttttaaatttttttgtagagacgtgctctacgctgcccaggctggtctcgaactcctgggctcaagccatcctcccgcctcagcctcccaaaatgctgggattacaggtgtgagccaccgcgcccggccccccttattgaacctctactccaatgtcgctctgacaatgtcgccttgctgccctgcataaaccagtgccccgaccacctccatcccttcccctgctttatttttctccacagcattgtccccacctgttctaacactgctcatgtttgtattcgtctattaactgtctccccaatcaataggtcagctctgtgtctaccgtattcacggctgtaaccccacagcgcctagcgcagtgcccggcacatagttggtgctccataaacatttgtcaaatggtggaggaacaacgaccactgtgcccccagtacgtgctctgaggcaggcccggcacggaacactccatgtgcctattttgatcctcagaagagtcccagggaagtcaatgtcatgaacaccccccacccactgcacaaacaggaaaaagcccctgcccacaagaaccccgtctgctttctgcgcagcccggcggcgcacagcaggtgctaaagagcctgcagctcttgactgaaccaaggatctgggctcacagccgggagcaccagaggaggggccagggaggtggaggatgggggcagactaggaagggtggatgtgacgatagagggcctctagagcccggcctggtcacactccgcaggcagacagcagatcaccaggaacctgagcctctctgaagactcctctctctgtgtcatccacacctggtgtccagttccacaaacatgctgtgagcctctgctctgtgccaggtgatttgctgggcagtgctggggacacagtggtgacagcccagccgtgcccagctgaggctcccaggccagtgggggaaaaagacccagccccagacagcgagaacccaaggcagtcagggctgagacagggaattccaggccctgaagtccaggagggcttcctggaggagagggtttggggaaggcagtggaatagagcagagggaagcagggatattctgggtagagtgcaagtgaaacagaagaactgaagcagagggttcccggaagcaagtggtattctatgtagctggtcaggtgggcaggagtcaggccgggcagggcctcctgggctacagtgaggaacctgggcttcctcccaagggcactggggagccacagcaggttctgagcacggaggggcagaggcaggtttttgttttggaaagagcctctgtctgccatgtggaggggcaatgggagtcggggagaccagggccagagactagggaggaggctggtggggagacaggaggacccaggcaaggtggggtggtggagtggtcacctagaccagggcaggggcttcagggagggagagaagatatacgtagagtcagttgccagaaggggtggcgtgttcggggagtagggggaggcatcagggatgaggccccaggtctcttttcccagcgatgaggtgggtagtggcgccttccctgataagggcaccaggggaagatacacttctgggggaagatgccaaggtcagtttgggacaaggtgagtgagaggtgcccagggacatcagggaggcatcctgattgatactgggatgaggtcccagtgctctgggccaggacgcagaagagtgaggtgaggtcacaggtggggagaggggagcaggaggcgccaggacatcctctgtgcctctcacctggcctcacccgcacctcctcagggccttctcccccttgttagagccctgccccacgagggcagcccaggacacagtgctggaggcaaaccaggacaggtgagcacaggtgtggccccctgcccggaagcaggctgcagaggcctcagaggaaccagggctcagaagccatcaggatgcaggtcataagaacacagctatcagcagctctggcaccacaaccccctcggctcctgcccagcatcatctcagagacaccttccctgttaccctccctccaccccaatttaaagtagcaaaccaggccaggggcagtggctcatggctgtaatcccagcactttgggaggccaaggtgggaagatcacttgaggccaagagtttgagaccaggcagagcaacatagcgagatcccatctctacaaaaaataaaatggcaaatcccctttctgactttatttttcaatctgacgtggaagatatttacctttcctttatttactccgcaaatgtcggccccctgagggcagggatttcatccgtcttgtgcacggctgcatcctcagcgcctagaacagcacctggcaaacaataggtgctcattcagtatttgtccaataagtgaatgagtgatttactgagcatttactctgcgccagtcgtggtaagtactgtacttcacatgtgtatctacttaatcctttcaacagccctgtgatgtgagtactattgttttccctattttacaaataaggaaactgaggcttggcagagtccataaattgcccagggtcctggaggtaggaaacagtggaactatgtccagagcctatacttttttttttttgagatggagtttcactcttttgcccagggttcaagcaattctcctgcttcagcctcccaagtagctgggattacaggtgcccgcgaccacacccagctaatttttgtatttttagtagagacagggtttcaccatgctggccaggctggtcttgaactcctgacctcagttgatccacccacctcggcctcccaaagtgctaggactacaggcatgagccactgcgtccggccatgagccaccacgcccggccagagcctatacttttaataacaggcataccaatcagacccacgtccaccaggctctggcttaaatccctgacttgtagcctctcactaactgctgtcaacaaacctgaagtagggtccatatcatctctatttttttgtttgtttttgaaatggagtcttgctctgtcacccaggctggagtgcagtggcaggatctcggctcactgcaacctctacctcctggattcaagcgattctcctacctcagcctccctagtagctgggattacaggcatgtgccaccatgaccggctaacttttattttttgtttttgcttttgttttttgagatagagtctcactctgtcacccaggctggagtgcagtggtgtgatctcagctcgctgcaacctccacctcctgggttcaagagattctcctgcctcagcctctcgagtagctgggactacaggtgcacaccaccacacccagctaattttttatatttttagtacatacgaggtttcaccatattggccaggctggtctcgaactcctgacctcgtgagccacctgccttggcctcccaaagtgttgggattacaggcgttagccaccacacccagctaacttatatttttaatagagacggggtttcgccatgttggtcaggctggttgcaaactcctcacctcaggtgatctgcccatctcagcctcccaaagtgctgggactacaggcacctgccaccacgcctggctatttttattattattatttttagtagagatggggtttcgccatgttggccaggctgatctcgaactcctgacctcaaatgatccgcctgccttggcctcccgaagtgctgggatgacaggcatgagccagtgcacccggccatcatctctatttatcagaataataaatggagactcaacaagggactgtccccagccccactttgggtaagtgcagagctggtgtcaaaactcagctctccttggccccaaagcctccgaatacgcccatttgacagagaggggaaaacaaggcctccgaagtgggagaaagagaatgtgaacttctgagcactttgcaggaagccaacaagaaggagagccccaaagaaagcatgtggccatacagtttcctgcccttctgtctgggtttgcacacagagcagggctcaaatcccctctccctgcaggaacccggacaagtgggagtccccacctagctcatctccatctgcaaaggggggtcctaaaggtgcccactttacagggttgttttgccatccgctgagacaacacctgtaggtcccctgcactgggtggggctgggaaaggtgcagtcaccttttactgattttcttccttggtgactcccaggctctctgaggaggccacgggcctgggtggttggtaagaactacccgaaaaccttcccctacttttcctctcttctcctcggtgacctggttcctctcccagtaccaaatccaggccctcggcacaaagagggttaggcggctgccccaggaggcctgcccaggtcacggcctctggccggtgcccgccacacccaccctggtacccaaaccgggccccagatccttggtgactcgatccctccaaattcaggtgatctcccctggctccaaatcaccaaaccctcccaggtcctgcggcagacggagccgagccccaaccaggaagggagtccgagcactgggacttcaacgccaccatctccaagactcggtttggggtgaaagatggcgctgactgggtacagctggctgctcctcagtggtgagcgagaatggcaccccccagcacctcagccccccgaggaccccagggaggggaggggacccccagtctgagagagggaaggtgtgagcagaagtccagcgtgctagggagggagggcagccctgcttcacaccggcagtttacccctccaagaggcatctgcattgggcaggctggggacagccacccagagaggttttcagggtgggctttggagatttctaagcccagggcacaagccaggacaagggagccgctgttgctccttcattcctgcaggtttctgttttatcagctatggaagccttgatgaggctaaactcttcccagcagctgtttctcccggaagatgtagcttagggcagttgcctttcccttctcagcctctgtgtacccacctgtgaatggggcctcactgacagggtcatgtaaaggtcattataagcagcaccacatatgccgtgtgcccggagctgttctgagagcttctcatggtttaaaaccacctatgaggggccgggcaaggtggctcacaccactaatcccagcactttgggaggccgaggcgggcggatcacctgaggtcaggagttcaagaccagcctggttaacatagtaaaaccccatctctactaaaatacaaaaaattagctaggtgtggtggcacatgcctgtagtcccagctgctcgggaggctgaggcaggagaatcacttgaatccaggaggtggaggtcacagtgtgccgagactgcaccactgcactccagcctgggcaacaaagcaagactccatctcaaaaaaaaaaaacaaccccaaaccacctatgagggaggcccacacatgaaccgcacttcatagggagaaaacgaggctcagaaaggtgaaaccattggccgctgtcacacggccagagagtggcaggactgagggctagacccagagaccctcactcctagccacactctaacagcctggaaagtaccagaaagctggccagccatgtcagtccttttgacgtgagcactgtcacagccgcccgttccgggcattcaaaccacacgtcattcaaacccaagcagccccgaccagctcatcgggcttggggctgatctgcttggttgagaaggaaaggggtggagtgtgttcatcttacccctgctttccgctgtaggcgagcttggagaggcagaggcagagccccagactgggagtcaggacccagggggcaggccctgacatcctacgtggggccatacaattagctgggctggatacgcagccggatctcgcgagacttagtttggtgactgtcacgatgggaaaaccctttgggtccggcttaaagccgcaggtcctgtgggccgagcacttgctttgcacttgctgtatgcaagatgtgatgctagatccttggcacagtccatcagacccaatcctcacaacacacgcctccctccctcggactgagtccctccctgggactgagctcctgcatctgactaacatgtattgggcacttactgtataccaggcattgtaagcatggtatgtatacagaatccttacaaccttaccaggcaggtagacctgtcatccccatgtgagagttggaagaacagaaacacagagaaagacagtgtactcgaagccatgcagataaactcccagaaagattaggtggctgagatgttgagagtcagagttgcaggttcaaatcctggttttgcctgtcctcatttacacagaggacactgggctggggacgtgccccgagcctgagtctcttcttctgtcaaatggggcgattgatcaaacctgcctcatccaacccctctgactcctcttcctcagccacattcctgaatgtgggggccgagatctctatcaccctggagcctgcccagccgagcgaaggggacaacgtcacgctggtcgtccatgggctttcgggggaactgctcgcctacagctggtatgcggggcccacactcagcgtgtcatacctggtggccagctacatcgtgagcacaggcgatgagactcctggcccggcccacacggggcgggaggctgtgcgccccgatggcagcctggacatccagggcatcctgccccggcactcaggcacctacatcctgcagaccttcaacaggcagttgcagaccgaggtgggctacggacacgtgcaggtccatggtgagacaccccccaacacccgcctctgccccagctgggccttcccatctccttctcaatccttcttttttttaaaaaaaaaaaaaatccaacaaatcatcagggaaaccatcagggaataagtttctaaaataacctcaaaatgctcacctccttcaagatggcctccaggattagacctgcctcctaaaaccattctttgtccctccggctgagggtgtgggggcccagccacaatccggccatgccccttgttgggggaagggaaggccctcagagcaggtggtgtccggccccctccccctctgtctcttgcccccacagagatcctggcccagcccacagtcttggccaacagcacagcgctggtggaacgtcgagacaccctgcgccttatgtgcagcagccccagccccaccgccgaggtccgctggttcttcaacggtggggccctgcccgtcgctctccgcctgggcctgtcccctgacggccgggtgctggccaggcatggcatccgccgggaggaggccggcgcctatcagtgtgaggtgtggaacccggtcagtgtcagccgcagcgagcccatcaacctgaccgtgtactgtgagtcctcctggccccactggagatacccagtgtccaaacctcatggatggggaaactgaggccaggagagggggcctaagggcacacagcgagtcagcaggcaagctgggattggggaccagggacccctcttaaagtgcacttgccctcgccaggtgcagtggctcacgcctgtaatcccagcactctggggggcctaggcgggaggatcacctgaacccagaagtttgagaccagcctgggcaacatggcaagaccccatctctaccaaaaaacataaaaattagccaggcatggtggcacatgcctgtagtcccagccactcaggaggctgagatgggaggattccttgagccccggaggccgaggttgcaggtgcagtaagctatgattgcaccactgcactccagcctgggcgacagagcaagatgctgtctcaaaaaacaaacaaacaaaaaaaaaaacaacaacaaacaaaaaaaatacacttgccccatatcctaaaggacttctacagaccacctttactattgaataatccttcagttaggagcaatatctacagagaaaggaaacagggccagttggtttgaaaagggagcaggggagggaatagtgtaatgggaggggacacaaaatttaacaacataaccaaagcatgcagtcgttcccaggagcagcagatgtgcagtgtggaatcctgggaaaataaatcaccaaggtacatgaggacccatgatgtagaaaaacttaagtgcctacaatcctagaatcttacaaccagagaattc

SEQ ID NO: 26 - DNA, 63984 bp, Homo sapiens
gaattcagtgtgccaatgtttgcaaagcattacacacagggcctgatagacagcaagcattcaataaatgctagctatggccgggtgtagtggctcatgcctgtaatcccagcattgtgggaggcccaggctggaggattgcctgagctcakaagttcaagaccagcctgtgtaacacagtgagacatcatctctactaaaaactaaaaaaaaaaaaaaaaaatagccaacgtggcagtgcatgcctgtagtcctagttactagggaggctgagacaggaggaccacttgagccccagaggtcaaggctgcaatgagtggtgatccaacaaccactgcactccakcctakgagacagagcaagaccctgtctcamaaaaataaaataaaataaaataaaagttwgttattactattattctctgattcaaagttctctakatwwgtgcacatttgcgatcagaacttggcctggtctgaccaggcatggtggctcacgcctgtaatcccacctctttaggaggccgagcaggcaggattgattgagcccaggagatccaggctgcagtgagctatgatcaggccactgcactccagcctaagcaacagagcaagaccaagcaagaccctgtatcacaggaaaaaaaaaaaaaaaaaaagaacttggcttggcctaggatggggcgcggccagaatgccttgcttaggggcgaggcccacagcgccccgatggctgcccagcgagcaactgagcaaccaggctgatgttacaggttctacaggttgggtgaaagccacgcccggccacccctacacaaatgagttgctccccgcccccacagtcttgaacgccatcctcccgcctggcttcttcgggactcaggagtatcttaactctggcctgatttctcccatgccacaccattaggggcacccagaaatcttgttgccaaattcctgccccctcagacacccactttcaaacccttgcttctagggaacccaagggcctggtggctctgtgcctccttcctcggagacagagagagagcaatgcctccctgaccggttcctccttgaaatctcagttatctgacctttaatcccatgccacgaccaaagacccataccttcgacaaggcgctgtgtccaagtcccacctctcggtagctcccagcccttcccctcccctctccaagaagagtcccgtggcagggcaaaatggctcacgcctgtaatcccagcactttaggaggccgaggcggatgcatcgcttgagctcagaagttcaagaccagcctgggcaacatggtgagaccccgtctctactaaaaatacaaaaaataaaataaaataaaatagccaggactgctgatgcgcgcctgtgaccccagctactcaggagggtgaggtgggaggatcacttgagcctgggagacagaggttgcagtgagctaagatctcaccactgcactccagcctgggtgaaaaagcaagaccctgtctcaaaaaaaaaaagtcccaggcctcccctagccccttgcccctctctgaagggacccagatatcctacctgcacttcccacccacacactgagaagccccctcctaccgctacccaccaaagccaccccaccctgctcctttttgagaatcaaactcaaaccgcaccagctaatttttttttcttttttgtatttttagtagagacacggtttcaccatgttggccaggctggtctcgaactcctgacctcaggtgatccgcctgcctcggcctcctaaagtgctgggattacagttgtgagtcatcgcgcccagccacattttattttatttttaaaaattttttagagatagggcctcactatgttgcccaggctggttttgaactcctgggctcaggtgatccttccacctcggccacccaaagtgctgggattacaagcatgagccaccgctcccggcctccaaatcccacctcttgaagacccacgtgccaggtcctccagcccccgccccctttggagacactggtacctgcaggcccctccccggttctctaggacccgccctctcctttcactctgggcgaggccgcccctatcccagccgcaccggtccttcccggcacacgcgaggctcccatggctctggcggtggccccgtgggggcgacagtgggaagaggcccgcgccctgggccgggcagtcaggatgctgcagcgcctagaagagcaatgcgtcgacccccggctgtccgtgagtcccccttcgctgcgggacctgctgccccgcacagcgcagctgcttcgagaggtggcccattctcggcgggcggccggcggaggcggccccgggggtcccggcggctctggggactttctactcatctacctggccaatctggaggccaagagcaggcaggtggccgcgctgctgcctccccggggccgaaggagtgccaacgacgagctcttccgggcgggctccagactcaggtgagccttcgccccagaacaaagtcctctggggtgaggcccaggtcttgctcccagcccctcctcccccagacccaggaacttaggcccccaccccctcctccctcagacccaggaactcaggcccccaccacctcctccctcagactcagggctccagcccccagcccctcctccctcagacccaggggtccaggccccagcccctcctccctcagacccaggaactcaggcccccaccccctcctccctcagactcagggctccagcccccagcccctcctccctcagacccaggggtccaggccccagcccctcctccctcagacccaggaactcaggcccccaccccctcctccctcagactcagggctccagcccccagcccctcctccctcagacccaggggtccaggccccagcccctcctccctcagacccaggaactcaggcccccatcccctcctccctcagactcaggggtccaggcccccagcccctcctccctcagacccaggggtccaggccccagcccctcctccctcagacccagaaactcaggcccccatcccctcctccctcagacccagggatccaggccccagcccctcctccctcagacccaggggtccaggccccagcccctccttcctaagggaacctggaaaatgggccacccagttttctccttccttgggcacccatgccctcagcccgattttgccatttccttggtcacccagcagcccaattctggttcccactatcccactatctcagaattcagggaccccatggggtttcctacactgaggataaaataaaagttagctattactattattctctgattcaaagttttctagatgtgtgcacatttgtgatcagaacttggcctggtctggctgggtacggtggctcacacctgtaatcccagctctttgggaggcccagctgggaggatcaggcctcagaatgtggagaccccatgggctcctaggtggaggagaggtagatggacacacccaaagaaactgatcattaggcccccatcacggtttctgcctggactacccacttggtctttagttcctgaggaacagctggctccagacccaggacctgcctggaggccacccctctgctgttctgcactgaggaaggaatctcagagtgaccaggcagatgaggtttggggcccagagcccagaacaaggtctagttcagggacccatgccacttctttatattaaatattttgtagtgtctctttttttttttttttggacacaaggtctggccctgtcgcccagactggagggcagtggcaccatcatgactcactgcagcctccaactcctgggctcaagtgatcctcccacctcagcctcccatgtagctgggaccacaggcgtgcaccaccatgccagactaatctttttattttttggtagagaggaggtcttgctatgttggctaggccggtctcaaactcctggcctcatgcgatcttcgtacctcagcctcccaaagtgctgagattataggtgagagccaccatgtccagccaagtgtttccttaattcatcctgagaggacatgcagaggttcaacaacctacccacctatagttttttaatcactataatgcccaaattataagagagtgatcaaaggaatttttttcataaatattatctatgttttaaatgaaaatgccaaggcacaattattcttggaaggcagagctgactagtcagacactcgtacctgtaggtagaaccactgtcatacagaatcaaatagtcttcccttaatatataggagagctggatttctgcaaaattcagcgtaatttttttttttttttagacatggtctcactctgttgcccaggctggagtgcagtggcgcaattttgactcactgcagcctctgcctcccatgttcaagcaattctcctgcctcagcctcccaagtagctgggattacaggcacccgccaccacgcagcgataatttttatagtttttattagagacagggtttcaccatgttggccaggctgttctcaaactcctgacctcaagtgatccacccacctcagcctcccagagtgctgggattacaggcatgagccactgcttctggccaaaatctaataaaagccatgtatatcgtttttaatttttttttttttttttttttgagatggagtcttattctgtcatccaggctggagtgcagtggcgtgatctcagctcactgctacctctgcctcccgggctccagcgattctcctgcctcagcctcctgagtagctgggattataggcgggcgccaccacgccaggctaatttttgtattttcagtacagacagggtttcaccatgttggccaggttggtcccaaactcctgacttcaagtgatccacccacctcagcctcccaaagtgctgggattacaggcgtgagccaccacgcccagcaggaatggactcttaccttacactgttgagatagagtccagagccttatccctgcaggtgttccccatgaggggaggaagagggtgtcagtgggagccccaaggatagccagagtccttgcccatccccacaggcgacagctggccaagctggccatcatcttcagccacatgcacgcagagctgcacgcactcttccccgggggaaagtactgtggacacatgtaccagctcaccaaggcccccgcccacaccttctggagggaaagttgcggagcccggtgagtaagcccttgtcctcagctcccggagccccatcctgccctggcccagggacccaggggtccaggcccacagctgcttctttcctggagaccctcccatcataggctctgggaggcctcagcggtgtctcccccacccctctcccacccaggtgtgtgctgccctgggctgagtttgagtccctcctgggcacctgccaccctgtggaaccaggctgcacagccctggccttgcgcaccaccattgacctcacctgcagcgggcacgtgtccatcttcgagttcgacgtcttcaccaggctctttcaggtcagggaaggccaaggctgggagctagacttgggtccaggaggaagtagagggctgaatcctggattcctgggtctgagggaggaagggccgggacctggactcctggatctgagggaggaggggccggggcctggactcctgggtctgagggaggagggggctgggacctggactcctgggtctgagggaggaggggctgggggcctggactcctgggtctgagggaggagggggctggggacctggactcctgggtctgagggaggaggggccggggacctggactcctgggtctgagggaggaaggcctggggcctggactcctgggtctgagggaggagggcctggggcctggactcctgggtctgagggaggagggcctggggcctggactcctgggtctgagggaggagggggctggagacctggactccagggtctgagggaggagggggtgagggcccggactccagggtttgagggaggagagggcggggggcctggactcttgggtctgagggaggagggcctggggcctggattcctgggtctgagggaggagggcctggggcctggactcctgggtctgagggaggaggggctggggcctggactcctgggtctgagggaggaggggctggagacctggactccagggtctgagggaggaggggctggagacctggactcctgggtctgagggaggaggggctggagacctggactccagggtctgagggaggagggggtgagggcctggactccagggtttgagggaggggagggctgggggcctggactcttgggtctgagggaggaggaagctagggtcccaaactcctgagttctggagaaagaagagcttggggtcttgtaaaagggatatgcctgaggcccaccatgggtgtgaaggaggtggttggatcctcgagccctagggactacttagggatgtgagctgcttccctggtcgctccctgacccaagccctgccccaccccagccatggccaacactcctcaagaactggcagctcctggcagtcaaccacccaggctacatggccttcctcacctatgatgaggtccaagagcgtctgcaggcctgcagggacaagccaggcaggtaaagggtccagggctcagcagaacaaggctgcagggctcagggatctgggctctgggctggtgcgtggtggagcccagatgtccttccaagagtgggaacagaggtacccaggaccccagagagttgataactcagaggcaggacactgagtgcccctcccagcccgcctcttctctcgaggcctcctgtactgtcccataatcctgcagctaagggacagtgcccgctctagcaaggagcccaaagacccgcttgagggtaaggtccgtttctggtaggtcagagtcatgttgtaccatctgttcagtattttgagtatgaatttcccacctgttggcataggagactgaaaaacaagacatgagagtccttaaattatttcaaccaggagttttgagctgttgggtccccctagagggctgagaattgagctgtctagataccaagagaagagaaggtcaggtttgtgagtctctgcagggctgaggtgcaggggtaggacggtgagtgcgttagcattcttccagttacacttcaaacttatttaagggaaaagaaaaaggaaagaataaattcctataattgaaaaggccaggccccgcacagtggctcacacctgtaatcccagtactttgggaggccgaggcgggcaaatcacttgaggtcaggagttcgagaccagcctggccaacatggtgaaacctcatctctactaaaaatacaaaaattaggcctggcgcagtggctcacgcctgtaattccagcattttgggaggccgaggtgggtggatcacctgaggtcaggagttcaagaccagcctggccaacatagtgaaaccccatctctactaaaaataccaaaaatttagccaagcgtggtggcgtgcacctgtaatcccagctacttgggaggctgagacaggagaatcacttgaacccaggaagtggaggttgcagtgagccaagatcacgccattgcactcctgcctgggcaacaagagtgaaactccatctcaaaaaaaaaaaaaatacaaaaattagcctggcatggtgatgcgtgcctatagtcccagctacttgggaggttgaggcacaagaatcacttgaactcgaaaggtggaggttgcagtgagccaggatcccgccactgcactccagcctgggcaacagagcaagactctgtctcaaaaacaaaaaggaagaaaagaaaagaagcctagggtgtgggtttcaggcacagctagatccaggtgctcaatggctactgtcaggaatcagttcctgttcatcccctttctctgctttcctctgtttgcttcattctcaaacatggtttctcctcattgtggcaaatgacttctagaagtcccagctgtgtaccctaccttcttagcaacctctgtaagaaagggggcaccttgctctgacacttgcagcgaaagtcccagaacggactcccatcactgtggtcaggggtcctgaaatgcactgattggccaccccagccttgtttaaactccagtgaagcgaggagagatctccaaatggaatcagggctgtttttatcataaaagagccaagcaggcaaaaacagcatatatcccctagagaggcaggcaggggtctagcacatgccgttgcctagaggatgggaagctgggggtgaggacctagacacctggattcccaacaggccaggggactggaagttcacaaaagggatggcagtgaccactccctcaccccatcctacctacctctccctccagttacatcttccggcccagctgtactcgcctggggcagtgggccatcggctatgtgagctcagatggcagcatcctgcagaccatccctgccaacaaacccctgtcccaggtgctcctggagggacagaaggacggcttgtgagtctccattctggtaggaggagggtgtcagcaaaatctggttggaaagatcttgcatgttgtgcactgccggtggccaccacgtttgagggtgcaaccattcacataggggacatctcaaatctgcagtactacaaaattccagcaggtggcagtcaaaggtcttgaggaaggggcgcctctgagggtcgcacaaagtggccatagatcgggcccagccacagctccgaggagaagtgtgtggggcattgggcacaaccgcaagggctccattccttggaactgagctcaagagcgtttgcttctattttcttcctcttttactttagttaatttttaaaaaatgagatggggtttcgccatgctgcccaggctggtctggagctcctgggctcaagcgatcttcctgcctcggcctcccaaagtgttgaaatgacaggcgtgagccaccgtgcccagccagcttttgtttctagatatgagatcctgctctagaatctagattgatggggcagaaacagaactggagaacttgctagacaggtgtttttttttttttttttttttttttttttttttttttttgagacagagtcttgctctgtcgccctgactggagtgcaatggcatgatctcggctcactgcaacctctgcctcccagattcaagcgattctcctgcctcagccgcctgagtaggtgggattacaggcacccaccaccacacccggctaattttttgtgtgtgtttttagtagagacagggtttcaccatgttggtcaggctggtctcgaactcctgacctcatgatccacccacctcggcctcccaaaatgctgattacaggcatgagccaccatgcccggtcctaagttttggatttttaatagagatggggttttgccatgccaggctggtctcaaactcctgacctccagtgatcttcccttctcgaactcccaaagtgctgggattacaggtgtgagccactgtgcccggccaggaagacaggtttcttttcagagtttcacctttagccagaattttcttatcagtcatatctatatgactactgacatacaagagaggagataggaaggtaggtagctagctagatagtcagataggtagatagatagatagatagatagatagatagatagatagataggcagataggtagatatgctgttgattatttgcaataattattattaattttttaatatataatttttttaacatttttggtggggcacggtggttcacgcctgtaatcccagcactttgggaggccaaggcaggcggatcacctgagatcaggagttcaagaacagcctggtcaacatggtgaaaccccatctctactaaaaattaaaaaaaattagctgggtgcagtggcgtgcacctgtaatcccaactactccagaggcagaggcagaattgcttgaacctggcaggtggaggtttcggtgagctgatatcacgccactgcactccagcctgggtgacagagcgagactccatctgaaaaaaacaaaacaaaaaaattttattgtatatttggtagagatgggggtggggtgtggctcaccatgttgcctaggctggtctcgaactcctgaactcaagcaatctgcccgcctcaccctcccacagtgctcagattacaggtgtgaaccacacgcctggccaatttatagtaattatcttctataaaatcaccacacaccctgaattattgaatatcaagccgttgctcccaggggaaatacattcttgggtcctgagtagctaggactacaggtgcacgccaccacgcccggctgggtcaccacatttttgtcaaccagtcacaacatagtaacctttatgtatgttttcgtttaaagacactttattcaaggccgggcgcagtggctcacacctgtaatcccagcactttggaacaccgagtcgcgcagaacacgaggtcaggagatcgagaccatcctgcctaacactgtgaaaccccgtctctactaaaaacacacaaaaaaaattagccgggcgtggtggcgggcacctgtagtcccagctactcaggaggctgaggcaggagaatggcgtgaaccctggaggcggaggttgcagtgagccgagatcgtgccactgcactccagcctgagcgacagagcaagactccgtctcagaaaaaaaaaaaagaaaaaaagaaaaaaaaattgacactttattcagtacctattgttggttcgctaacattgaactcacaaccaacagcagtataacttgtgtctcagcaaagcttatacaacacacacgttttctccataagacacatcacagccttctttcacttaggaacaggagacaacacttcagctactcttggggaccatttaaaacagaaaaatcagaggccgggcatggtggctcatgcctgtaatcccagcactttgggagactgaggcaggcagatcacttgagatcaggagttcgagaccagcctggccaacatggtgaaacctggtatctagccaggcatggtggtgtatgcctataatcccagctactcaggaggctgagacgagaattgcttgaacccgggaggttgaggctgcagtgagccaagatcacgcctctgcattccagcttgggtgacagagtgagattccatctcaaaaacataaaaataaagtcaatcataagctgggcgcagtggctcacgcctgtaatcccagcactttaagaggctgaggtgggtggatcaccaggccaggagatcgagaccatcttggctaacacggtgaaaccctgtctctactgaaaataacaaaaaattagctgggcgcagtggcgggcgtctgtagtcccagctactcaggaggctgaggcaggagaatggcgtgaactcgggaggtggagcttgcagtgagccgagatcgcgccactgtacttcagcctgggtgacagaaccagactctgtctcaaaaaataaaaataaaaataaaataaagtcaatcgtagaagtcccttcttattgggtgtttatgcacagaggaggacgctgcatttaaaatttttttctaatttaaaaaatttatttgcaccgggcacccagcaaagtgctgggattacacggtggctcacacgtgtaatcccagcactttgggaggccgaggcgggcagatcacctgaagtcaggagttcaagaccagcctggccgacatggtgaaaccccgtctctactaaaaatacaaaaattaaccaggcatggtggcaggcgcctgtaattccagctacttgggagggtgaggcaagagaattgcttgaacccgagaggcagaggttgcagtgagccgagatcacgccattgccctccagcctagggcacaagagtgagacttcatctcaaaaaaaaaaaaaaaaaatttattcgccaagcatggtggctcatgcctgaaatcctagaactttgtgggaggatcacttgagcccaagagtttgagaccaacctggacaacatagtgagcccccatctcaataaagagaaaaaaagaaaaaaaaaattagttaccgacaaggtatcactatgttgtccaggctggcctcaaactgctgggctcaagcgaccctccctcttcggcctcccaaagtgctggggttacaggtgtaaaccactgcacctggccagcgcttcatgtttcttttggtggttctttttttttctgtgacagggtctcactgtcacccaggctggagtgcagtgacatgaacacggctcactgctgcagcctcgacctcccaggctcaggggattctctcgcttcagcctctcctgagtagctgagaccacacgcacatgccaccatgcccagctaatttttttaatttttttttttttagacatagtgtctttctgtgttgcccaggctggtctcgaacccctgggctcaagcaatcctcccgcctcagcctctcagagtgctgggattcaggcatgagccactgctcccagccagggctgcatgttttataagcactgtctttcttatttatttatttttaaaatttcttttttttttttttttttgagacagagtcttgctgtgttgcccaggctcgagtgcagtggtgcgatatccattcactacaatctctgcctcctgggttcatgaaattctcctgcctcagcctcccaagtagctgtgattacagacacgcacctccatgcctggctaattattattgtatttatttatttattttgctatttttagtagaaacggggtttcaccatgttggccaggctggtctcaaactcctggcctcaaatgatctgcctgccttggcctcccaaagttctgggattacaggtgtgagccactgtacccggccagcactgtcttatttaatccatcacaaatctttgcctcaggcatgatcatgtccatgttacagaaggggaaactgaggccagaaaggtcgagtggccccagccaggtcacacagtgtgttagtgagagagccactgtggggcccaggtcagggatcctgcactgctccacatgacaggccaggcagggccactagcctcagggagtctgagggtccaatatttcatgtgctatacatgtcggaataactggagtagcattgaggcatgccagataggccgaggaaatgatccagggggagacccagggagcccagagcttgcttctccggtgtcctggagcccagtgctgagatctcgcctacaaccctggttctcggtctctctggtccttgctgtgtgaccttgggcaaatgcctttcccaccctgagccttgggtcactgtctgtgagggaagaagtggtacaggtgctctcagaggatctttccatcctgatattatcagattctaggatttgatcactttcatgatctgtgacactaaaatctgttatgcttgggcgtggagaagggtgaggttctagaagagctaagccagagattttcccttttttttttttgagacagagtctcactctgttgcccaggctgcagtgcaatggcatgatcttggctcactgcaacctctgcctcctggattcaagcaattctcctgactcagcctcctgagtagcatgcaccaccacgcccagctaatttttatattttcagtagagacggggttccaccatgttagccaagctggtcttgaactcctgacctcagatgatccacccacctcggcctcccaaagtgctgggattacaggcgtaagccaccacacctgccctaagccagaaattttcatatcgttttctggttcttagtctatctcatccttgtttctggagcttgagtcactgaggttttgtgtgccctaccttgggagtctgaggggacatagccctgccctggggtatctgagaagacacagtcccaattagaggtgggtggagggaaaataagcccaggccagcaatggatttgggacagatcctcaactcagggaaatatggggccctgtagggggtaaaggtacttgttcatctgggggtgggaaatactggatggccccccagtccccctctcttcccttcccccagctacctctacccagatggaaagacccacaacccagacctgactgagctcggccaggcagaaccccagcagcgcatccacgtgtcagaggtgagacccgcacctgcacccgcagtcccagttccctgaccctgccacccccacgttgccttggctcagaggcctggggttggaatgttggcttggtggctctgtgaccttgggtaaatcacttgacctctctgaggctcagttattcttccggaaaatacggctcctcctgcctctttcccaggggtgatcacggggattaaataaggaactgatgctgctgagatcatcaggacagctaatgcattcgagcatttgccagcaatagccccgtgccagctcctaatcttcacagccaccctacgagtgagaaaaacaacaataacaaataaataatttattttttatttatttttatttttagagacagaatctcttctgtcgcccaggctggagtgcagtggtgcgatcatggctcactgcagcctcgacctctgggctcaagcaggcctcccacctcagcctcccgagcagccaggagtacaggtgtgagccactgcacccagctaatttttgtatttctctgtagagatggggtttcgccatgttgcccaagctggttttgaactcctaggttccagcaatcctcccgcctccacctcccaaagtgctgggattatagccatgagccactgtatctggccctaaattttttttagtataaatatatcccgtgcaatatttgggacatccttatacttcaaattgtattcacggtttacatgaaattcaaatttggaggccgggtgccaccgcacccataatcccagcactttggtaggccgaggccggcagatcacctgaggtcaggagttcaagaccagcctggccaacatagtgaaacccatctctaccaaaaatacaaaaattagctgggtgtggtggctcacacctgtagtcccagctgaggcacttgagttgggaggctgaggcacgagaatcacttgaacccaggaggcggaggttgcagtgagctgagatcacaccattgcactccagcctgggcaacagagtgagacttggtctcaagaaagaaaaaaaaaaagaaagaaagaaattcaaatttaggttaggcacagtggttcatgcctgtaatcctagtactttgggaggctgaggcgggtggatcacttgagcctgggagttggcggttgcagtaggccaagattgcgaccctgcacttcaacctgggtaacggagtggggctctgtcccgcaaaaaaaaaaaaaaagaaagaaagaaaaataatgaaattcaaatttagcagcatcagcatccaatacttttatttgctaaatctggcaccactgggtgtagacaactggggagaagaagtctcataacaaggagtgaagacatggccgggcgaggtggctcacgcctgtaattccagcactttgggaggccaaggcgggcagattacttgaggtcaggagttcgagactagcatggccaacatggtgaaaccccatctctactaaacatacaaaaattagccaggtatggtggcttatgcctgtagtcccagctactcaggaggctgaggcacaagaatcgcttgaacctggaggcaaaggttgcagtgagccaagatcgcgccactgcactccagcctgggcaacagagcaagactgcgtctccaaaaaaaaaaaaaaaaaatgagtgtagacatgtaggaggccattggacatgccagccttggacttaggagagggttcagttctggcacagaggtttggtttattattttttttttaaatagagacggggtcttactatgctgcccacgctggtccagaactcctgggctcaagcattccacctgccttggccgccagaagtgctgggattacaggcatgagccacagcgccaagatagaggaggtgtgggattttctttctttcttttttttttttttgagacggagttttgctcttgttacccaggctggagtgcaatggtgcaatctcagctcactgtaacctccatctcccgggttcaagcgattctcctgcctcagcctcctgagtagctgggactacaggcatgcaccaccatgcccagctaatttttgtatttttagtagagacggggtttcaacatgttgaccaggctggtctcgaactcctgacctcagatgatccccctgcctcagcctccaaagtgctgggattacaggcgtgagccaccacaaccagccgaggtttgggattttcttcctgtggcccaagttgtgtccccgtggctgacgcatgcccctcgctgtcttctctatcctctcacctgccaggagcagctgcagctctactgggccatggactccacatttgagctctgcaagatctgtgctgagagcaacaaggatgtgaagattgagccgtgcgggcacctgctctgcagctgctgcctggctgcctggcaggtgggtctgacccctgtggcgccttcccctctggtctccccctctctacagggaaagccccaaaaggatctccatgcctcattgatcatatggggaaaccgaaggccagagagggcaaagagctgatggcaaccactcaggagcccggctgtctttcccagggcctctggttccatcccactctgcacacgctgcctctgtttctccctctccggcaatgttatcagtggaaagctctccttccttctctgcctaggtgatccccagccagtggcttcacgtctctgagccttagcctcgtcccctggagaacggggctgagaatagtgacctcccaaaggccacagtgaggctgggcacggtggctcacgcctgtaatctcagcactttgggaggccggggtgggtggatcacttgaggtcaggagttcgagaccagcctggccaacatggtgaaaacccgtgtctactaaaaaaaaaatacaaaaattagacgggtgtggtggtaggggcctgtaatcccagctgctcgggaggctgaggcatgagaatcacttgaacctgggaggcagaggttgcagtgagcagagatcgtgccgctgcactccagcttgggtgacagagcgagactccgtttttttaaaaaacaacaacagcaagggccacctgagggtctgagcctggaaaggcctggcccggaagctgtggccacagctccatggggatccctggcctgtgtgccccctcctgacctcggctctggttccgttcctctctcaccttccctcccagcatttccctccacattcctctgctctccacgactcttctctccttccgtctcccttcctctgtctgtcttccccacatcaatcttttgggcggggagctcctcgttggcccaagggacaggatggagagcaggggagcactgaccctttccctcccgacctcccccagcactcggacagccagacctgccccttctgccgctgcgagatcaagggctgggaggccgtgagtatctaccagttccacggtcaggctactgctgaggactcagggaacagcagtgaccaggaaggcagggagttggagctggggcaggtgagcagggccagccgggagctggaatccaaattcctgaggcctgagtggggagggactggagcctggactcctgggtctgagggaggagagactgggggcctggactcctgggtctgagggaagaggggttggagcctgtactctgagtctaagggaggagggctgggggtcctggactcctgggtctgagggaggaggggctaggggcctggactcctgggtctgatggaggtgggtatggggacctggactcctgggtctgagggaggagaatatgggggcccggactcctgggtctgagggaggaagagctgagggcccacactcctgggttctaggagaggagggggctgataacaagattctcaggtcctagggaactggtcttttgcttccccaagggctggggctgtggctttccctggctgtaaccctcctaagtgttcatacgttgtcttggtctctgttatatcttgagtctagaacagtgcctgaatgctgagtcccaggcaggagaacatggaggcgagaagaaaatggcagctcacaagccccttctccttcctctgtcccaccccaggtgcccctttcggctcctccattgcccccacggccagatctgccccccaggaagcccagaaatgcccagccgaaagtggtgagtcaggcgctggtctgaggttgggggctggggtctcactcacctccagggtccctggttcacctgtgcactcaggggtgccagggcagggactcatccttggcacccatttccaaggcacccatcccctctgtgacctcttcccttgttttcattccccctctgggactttctttttttttttttttttttttttttgagacggaatcttgttctgtcgctcaggctggagtgcagtggcgcaatcttggctcactgcaacctccacctcccgggttcaagaaattctcctgcctcagcctcctgagtagctgggattacaggcacccaccaccatgccccgctaatttttgtatttttagtacagacagaatttcaccatgttgatcaggctggtctagaactcctgacttcattatctgcccccctcagcctcccacagtgcggggattacaggagtgagccactgcgcctggcctcaaggactttctagctctccttccagcatcccagatgtgtcctacctcggggcctttgcataagctgttcccttggcctgcacagtctttcctgaggcttgctttcccatcccttttcagggaggccttccctgaccactctgttcaagatagcacccctagctggggtggtggctcatgcctgcaatcccagtactttttttttttttttttgagaggagtctcactctgtagcccaggctgcagtgcagtggcataatctcggctcacagcaacctctgcctcccagattcaagcaatgctcctgcttcagcctcctaagtagctgggactacaggcacccaccaccatgcccgactaatttttggatttttagtagagacgaggttttgccacattggccaggctggtctcaaacccctgccctcagctgatccaccgccttggcctcccaaagtgctgggattacaggcatgagccaccatgcccggcctgcaatcccaacactttgggaggccaaggcaggaggacggcttgagcccaggcatttgagaccagcctgggcaacatcacaagaccccaacactacaaaaaaattttaaaattagcccaaagtggtggcgcacacccgtagtcccagctgctcaggaggctgaggtgggagggtcccttgatcccaggagttggtagctccagtgaggcgtgatcacaccactgcactccagcctgggcaacagaatgagaccctgtctctaaaccaataaaaaaaaagagtctgtaatcccagctgttagggaggcagaggcaggaggaaagcttgagcccaggattttgagacctttctgggcaatatagcggaaccccgttctctaaaaaaaaaaagaaaagatgaaaatagcaccgctgtccctcggggccctgctctgctgtatgttcaaagatctttcgccacccggcagagcttagggttggttttgtcggcttttatcactgtcaggttgcaaccttcctgcaggtcaggcctttgttgtcttctccgtcatatctccagagtgcagaacagtgcctagcacacatacacgtcataggtgctcaataaatagatgccaaatgaatacactgaagtgagtcttcccaacagccctatgaagtcaaaagtgttcctctcccggctgggcgcggtggcttatgcctgtaatcccaacattttgggaaggtgaggcaggtggatcactgagttcaggagttcgagaccagcctaaccaacatggtgaaaccctgtctctactaaaaatgcaaaaattagctgggcgtggtggcgcacacctgtaatcccagctacttggaagactgtggcaggagaatcgcttgaacccgggaggtggaggttgcagtgagccaagatcgcgccactgcactccagcctggatgacagagggtgagaccctgtctcaaaaaacaaacaaacaaatgaatgttcctctccccattttccagaggaaaaaagttcagagaggtgacagtacctgcccaaaaccacacagcctgaaagaggagaagtcagcgttggagtctttaaggcccccaaaccatctacttatttttttgttgtttctttgtttgtttgtttttcttttgagatggagtttcactcttgttgcccaggctggagtgaaatattatgatctcagctcactgcaacctccgcctctggggttcaagctaattctcctgcctcagcctcctgagtagctgggattacaggcaggtgccaccacgcctggcaaattttgtattttttagtagagatggggtttctccatgttggtcaggctggtctcgaactcccaacctcaggtgatccgcctgcctcggcctcccaaagtgctgggattacaggggtgagccaccgcgcccggcctacttattttttaataagccctgtcctggctttcttttctccctacgctgccaccccaggatttttgggaccctggattgctggggagaagcagatctcttagtatctccggctgagtacacacaggcttcgatcaatactgagctgtcttcaaacaaacagctcaggaagtccgggaacattattcgaccacagcaaacaagagagccagcaggaagcggggcggtgggggggagggtggcggtgaaaccagccagggaagctaaaaacagatccaacctgccgccaaaagcaaatggaaacattaggaggcactcagccggctcccagaggacagtgatgggggacacagccaggacagcaggctgacagggacctcgggcctgatggtgacacctttgcctaggccataccctccgcctcccccaccctttcctcctctccccaaaccctgcctgattaaaattccagtccactcccacctagtctttcattcttcaaaacataccacagaagagacagccttgggtttgttacttctcagcaaggcactgtcataacttttgttgttgttgttgttgtttgagatggagtctcactttgtcacccaggctggagtgcagtggcacgatctcagcccattgcaacctccgcctgccaggttcaagcgattctcctgcctcagcctcccgagtagatggggtcacaggtgctcaccaccatgcctggctaatttttgtatttttagtagagacagggtttcatcatgttggccaggctggtcttgaactccttacctccggtcatctgcctgcctcggccttcttaagtgctgggactacaggagtgggccccgcctgtcataacttttgctatgtgcctggcattgctttttttttttttttaagatggggtctctgtctagcggagtgtggtggcgtgcacctgtaatcccagctactcaggaggctgaggcaggagaatcgcttgaacccaggaggcagaggttgcagtgagccaagatagcgccattgcactccagcctgggcgacagagcaagactccatctcaaaaaaaaaaaatagggtctctgtcagccaggctggagtgcagtggtacaatcacagctcactatagcctcaatcttctgggctcaagtgatcctccctccttagcccccagagtagctgggactacaggtgcctgtctccacacccgaatcatttttaaattttttgagcagtgaggctggggctgctgtggacactggatgtgatgggactgtgtcagtggtcagtgtcaccgtggttgtgatctgtgtatggtgctgtggcccctggggttgctgtctgcacgctgctgttctccatctgagaaacctccctttaggggacgacactgccattgagctggatctcatcaccccactgaccactgaggacctctctgaccctcagtgttttcatggggaaaatggggaccagcctgacacaagccccacaggctgggtttttttgtttgtttgtttgtttgttttaatgttttaatttaattagagacagagtctcaccgtgttgccgaagttggtctctaactcctgggctcaagtctcccaaagtgctgggattgctggcattagccacttcgtctagcctccccatgagttttgatgaagccagcaagctcagtcatctctaacctgagtcatatcccctccctcacctctcagaaatctccactggcagccaagcgcggtggctcacacgtgtaatctcagcactttgggaggccgaggtgggcaaatcctttgcttgaggtcaggagttcgagaccagcccggccaacatggtgaaaccccgtctctactaaaaaatacaaaaattagctaggcgtggtggcgggcacccgtaatcccagctactcgggaggctgaggtaggagaatcgcttgattctcgcttgattatcgcttccgccaggaggtggaagttgcagtgagccaagattgtgccactgcactctagcctgggcgacggtgcaaaaactccgtctcaaaaagaaagaaagaaagaaagaaatccccactggctccccagggctctaagaactcaagccaaagtcctctccgccgcccaaagacctggggctggggatctgactcttccccacctctctgatctcccctactccacctcctttccggcaacattggacccttgctgctcttctaacttgccagcaagcctccactcactcggagcctctgtctggatccttcttgcactcaggcatcagctgggtcattcccatctccaagaggcctccccggcatcttccctctcccaggcactttgaaggacatggaacttgctctgggacatttccttgttcaggagctgatcagtcactgcgagcctcgggttcagtggagcatcagctccaccaggacaaagatagttttctgtcttgttcacagctgtcttctcagagcgaaaaacagggccttggcctggcgcggtggctcatgcctgtaatcccagcactttgggaggctgaggcaggaggatggtttaagcccaggaggtcaaggctgcagtgagctatggtcccatcactgcactccagacgaggcaacagagcgagaccctgttttgctttgttttgttttgagacagtttcgctcttgttgcccaggctggagtgcagtggtgcaatcttggcttatggcaatccccacctcctgggttcaaacgattctcctgcctcagcctcccaagtagctggaattacaggaatgtgccaccacccctggctaatttcgtatttttcatagagacagggtttcaccatattggccaggctggtctcaaactcctgacctcaggtgatccacccacctcggcctcccaaagtgctgggattacgggtgtgagccaccgcgcgtggcccctgttttttcggtttgttgttgttgttgttgttgtttttaaaaaagaaagaaaagtaaagaaagagagagagaaagaaagggagagaaagaaggagggagagagaaaggaaagagagagaaatagaaaaagaaagaaagggagggagggaaagagaaaaaagaaagaaggaaggaaggagagagcgagagagaaagaagaaagaaagaaaagaaaagaaagaaaaagaagaaaaaagaaagagaaaaggaaaagagaataaaagaaagaaagggcctgacccactggagaggcttgggaactgtctgtggggcacacaagtgagcagaagggtggacacatggatggacaggcggacagacaaactgaaacttcatcctacacgagttagaggtgagagggaaaaggcagcatggactagggacaaggccaaaggtcctgtcagatggtggccgccaccactgtgtcacccctgtccagggcctgtgaaaggacgtccacccaggctgcagcctagcagagacatttcttcatctcctccccccaggcacttttggccctccccagacttcgggcccctcttctcttgccaagaattaaggctgtggcctcagccgcgcaggaagccacctccagcccccaggtggtctgggactcccaggtctaagacaaaggggacagggaagaggggcagagggaaagattggatgccgggaatcaaccgccctctcaaaatatctccattgcagagactcctaaaggggaactcccctccagctgcgctgggaccccaggaccctgccccggcctgaaggccaggtgagtccattccctaaccctccctggcccactccaccccactccaccctcctccacctggaggtgacctcatctaacccacccctctctccgcctacagggcacccagatgtgctgctcaagggagccccaagggctggaagggggttgtgaaaccgaaataaactgccaagcctggtctgtcctccagggtgcaaaggaagagtgcagtggccagcagggggcagcagagggcagcaggcactgggaaagggccgtccccaggcctggtccccacctgaacaacaggagtccaggccccagcccctcctccctcagactcaggagtccatactccagcccctcctccctcagacccaggagtccatactgcagcccctcctccctcagacccaggagtccatactccagcccctcctccctcagacccaggagtccatactccagcccctcctccctcagacccaggagtccatactgcagcccctccttcctcagacccaggagtccatactccagcccctcctccctcagacccaggagtccatactgcagcccctcctccctcagacccaggagtccatactgcagcccctccttcctcagacccaggaatccatactgcagccccttctccctcagacccaggagtccaggccccagcccctcctccctcagacccaggagtccatactgcagcccctcctccctcagacccaggagtccatactccagcccctcctccctcagacccaggagtccatactgcagccccttctccctcagacccaggagtccaggccccagcccctcctccctcagacccaggagtccatactgcagcccctcctccctcagacccaggagtccatactccagcccctcctccctcagacccaggagtccatactgcagcccctccttcctcagacccaggagtccatactgcagccccttctccctcagacccaggagtccaggccccagcccctcctccctcagacccaggagtccatactgcagcccctcctccctcagacccaggagtccatactccagcccctcctccctcagacccaggagtccatactgcagccccttctccctcagacccaggagtccatactgcagcccctccttcctcagacccaggagtccatactgcagccccttctccctcagacccaggagtccaggccccagcccctcctccctcagacccaggagtccatactgcagcccctcctccctcagacccaggagtccatactccagcccctcctccctcagacccaggagtccatactgcagcccctcctccctcagacccaggagtccatactgcagcccctccttcctcagacccagtagtccatactgcagcccctcctccctcagacccaggagtccaggccccagcccctcctccctcagacctaggagtccaggccccagcccctcctccctcagacccaggagtccagacccccaaccccttctccctcagacccaggagtccaggccccagcccctcctccctcagacccaggagtccagacccccaaccccttctccctcagacccaggagtccaggccccagcccctcctccctcagacccaggagtccaggtccccagcccctccaccctcagatcttcaaatggaatctggggccaggcacggtggcgcacgcttgtaattccaaggctttgggaggccaagtgggaaagactgagcctaggaagctgaggttgcagggagctgtgattgtgccacagcaatccagcctgggtgacagaccgagatcctgtcttaaaaaaagaaaaaaaaaaaaaagaaactgggcccccagccttctctgtgatacccaggagtcctgctctcaggatttagaagtccagaatcccaagttttctgagaatcgggcatccaaccctcctgcttcatcatggcaaaaaaaatccctggacctagacccagatatccaggttaagtccctggtcaaaaggaccacacatttccctgatggttatccaccttgccttgccacggtctgtgctcatccctctctctgtccttcattcctctctgacatctttctcccagagtaactgctaacttccagtctaaatcttgctgaggaagaagagataccacctcatgattcatcttggagtggcccaagcctccctccaccttgtttaaattgccccattcccggagaccttgccctgtgcccagcgctgggctgagcaatgctgaccaggaagcagtgatcactgccccactagggctcaccttccactagaggaaagagacctgtccctagacagtgatgacccagagtgggcatggctggggtagggaatcccagggggctacaggaacccagagtgggcacctgactcagcctgggaggtcagggagtgcttccaggaggaggcgatgtctgagctgatacttaaaagatgatgaggccagacgtggtggctcatgcctgtaatcccagcactttgggagactgaggcaggcgggatgcttgagctcagaagtttgagaacagcctgagcaacgtgatgaaactccatctccacaaaaaattttggaaaaattagccaggcatggtggcacatgcctgtaagtcctagctactcaggaggctgaggtgggaggatggcttgagcctgggaggtcaaggcttcagtgagccgagattgcaccactgcactccagcctgggcaacatggcaagaccctgtctcaaaaaagaaaagaaaattttttaaatgatgaaaaagtattccaatggacaggaggcttgaaagaatgtatcagggccgggcgcagtggctcacagctgtaatcccagcactttgggaggccgaggcaggtggatcatctgaggtcaggagtgaaaccccgtctatactttcaccccaacatggtgaaaccccgtctgtactaaaaatacaaaaattagccaggcatggtggcgggcacctgtaatcccagctactcgggagactgaggcaagagaatcacttcaacccaggagatggaggttgcagtgagccgagattgtgccattgcactccagcctgggcaacaagagcgaaactctgaaaaaaaaaaaaaaaaaaggaaggaagggagggagagagaggaaaaggaaggagggaaggaaggaaggagagaaagaaaagaaaggaaggaagaaagaaagaaagaaaagaaagaaagagaattttcacagatttagttccaagcaacagatgctacctcaggggcagaaagggaatttattgagaggatttggggtcactcacagaatcccaggagtgaactggggaatcaggattggaaagtgagcaggaagaatcctggcaactggccagcaatggtaacccagccacagtgacaccacggaaccggtctgatgaggccatgctggcgatggccactagacactgtagttgtctcgctgcctctgctgccccagaaataggatatggctgctcttctcattagctgttgctggtaataaatcacttcacaacttagccgcaaatgacagcaatcattgcattaagtctcatggttgctgtgggctgggatttgaagaaaggcgtggctggtttgttttggctcaggatgcaaacaaacagtgcaatcagtgatgcttgccacagggcggctgggggtgctggacaagtgggcatctctctgtggtctcagggcctcccccaccatatagtctctgcactggccagcttgggcttccccacagcatggctgcctcaaggtagtcaaactttatatggccgctgaagacccaggcagaagctgcatggccttttctagctcattttgggagttccgcaacttcacttcagctgaattctgttggttgtatgcaagtcaccaaactgcacagatttgagaggagggtgccatagaccccagctcttgatggaaagagtatcaagctctcattgtggaaacacacatgggatgaaagacactgtcacaacatggcaaaaccccattcctacaaaaaaaaaaaaattaactaggagtggtggtgcacacctgtactcacagctacccaggaggctgaggtgagaggatcacttgagccctggaggacgaggctgcagtgagccatgatcatgccattgcactccaacctgggtgacagagcaagaccctgtctcaaaaagaaaaaagaaagagattgttgtagccgtctttggaaaacagaatctgtcccagctgccatgcatggctggaagaggtggccaattcctgatattcaaaagtgtggaaggatttgccaagcttaagtcaccttagctccaacagatgcaggaaagcaaacatccattcttgttggcttcaagagtgggcaacagaggctttcagacagtaggaatttccttaaatgtgggaaggagctgcagatgctaggtaatccttcccgcaaaatatgtactatagcccgctcctttggttttttttgttgtgttttgttttttagacaaggtctcactctttcacccaggctggagtgtagtagcacgatcttggctcattgcagccttgatctccccagttcaagcgatcctcccacctcagcctcctgagtagctgggactacgagcacaaaccaccaccacccccggttaatatgtattttttgtagatacagggttttgccatgttgcccaggctggtcccaaattcctgggctcaagcgatccacctgcctcagcctcccaaagtgctgggattgtaggtatgagccaccacagctggctttgaatgttcaatatcaataggccctttgcagaagttcttatcgaaactttccccgcacaaccgtctctcattgtacaatcaaaaaatgcattcacactgccacccaatacaaaaaatttcaatagttccattttccagatctgagactggaatcagggaagaaccattcccctccaaatatgtcattctccccatattccacaagctgtgagctagttgtaaagttaatcgtcacacactgtgtgaaaaataatgggaaaaaaggtcaagaaaagataagtcagccaggcactgtggcttccgcctgtaatcccaacattttgggaggctgaggctggtggatcacctgaggttaggggttcgaaaccagcctggccaacatggtgaaaccctgtctctactaaaaacacaaaattagccgggcatggtggcgcatgcctgtaatcccagctacttgggaggctgaggcaggagaattgcttgaacctgggaggcggaggttgcagtgagccaagatcacgccattgcattccagcctgggcaacaagagtgaaactctgtctcaaaaacaatgaaaaggtaagtctggccaaccgtggtggcccacacctataatcccagcactttgggaggctgaggtaggaggatcgcttgagcccagagtttcagaaaagataagccttgttagttaaaatatgtgaggatatacacctgcggccgcatggatggaattagaactttttttttttttttttttttttttgatactgagtctcgctctgtcacccaggctggggtgcaatggcatgatctcagctcactgcaacctccacctcctaggttcaagcaattctcctgcctcagcctcccgagtagctgggattacaggcacctgccacaacccctggctaatttttttattttaagtagagagggggtttcaccattttggccaggctggtctcaaactcctgacctcgggtgatccacccacctcggcctcccaaagtgctgggattgcaggcatgggccaccatgactggccatttttatatttttttgtagagacggggtttcgctatgttgcccaggctggtctcaaactcccgggctcaagcagtcctcccgcctcaggctcctaaattgctgggattacagacgtgagtccctgcggctgacctggacctcagcttttaccctaagtgagacagaagtcatgggaggaccctggggcagaagagtgacatgagttgattcacatgtaaaaggaatccttcaggctgttttgtgagaataaattacaggggacaaaggcagatgatgttacaagactagtttctgcaagtctgcaagggtccacggctgctgttttggtgtttctgacttttctccttcatacacatgccatagagttctcctccctcacccagaacctcagatggctaggttcttcttttttttttttttttttttgagacagaatttcactcttgttgcccaggcaacatcgtgcagtggcacgatctcagctcagtgcaacctccacctcccagattcaagcgattctcctgccttagcctcctgagtagctgagattacaggcatgtgccaccacgcccagctaattttgtatttttagtagagatgcggtttcaccatgttggtcaggctggtctcgaactcctgacctcaggtgatccacccacctcggcctcctaaagtgctgggattacaggcatgagccacagcgcccagcctcagctggctgggttcttgagggaggtggaagtgggcgatggctgctgagagggcatgtaccagggtccagcccaaacagaaggtgcacaggctggggacagaagagctagggtatgggtgtcggtgctcacagtgtgtgagcttgacagcacctgggactgtcttggagtgccgccgcattccccatgagtgagtttgtattgtatatcctgggatgctccagtctggatggaatctgcacgtgagtttgtgtgccttgcaaacaaaccttccctgagcacctgcactgtgtctggtcttgtgctgggcggggtgcccaggggaggagcccttagctcaccacagtgatcaagacatccctggccctgccctcacaggctcacagtccactgagggagacagacctatccccagccagggacccccagagtgtgccgggctcaggtgggggagcccagagggggaacctgacccagccagggaaggcagaggggacttcctggaggaggggatggtacagttaatcctaaaaggtctttcccaatgtaacagttgctctgtaggatggatgcagtggctcatgcctgtaatcccagcactttggaaggcaggaggatcacttgagcccaagagttggagaccagcctgggcaacatagtaataccctgtttctattaccaaaaaaatacaaaaattagctggacatggtaacacaagcctatagtcccagctacttgggaggctgaagtggaaggattgcttgagcccaggcggttgaggtttgaatgagctatgattgcgcccactgcattcccggctgggcaacagagcgagaccctgtcaaaaacaaaacaaacaaacaaaaaaaacgttggtctcctgtatgaccaatggataaagtaaccttgaccagtctaataactcccaggctgacctgtaatccaagccttctctgtatgtctgagcaggcaaagcccagctccagggctacctcaacccccaggctgatcagaagcttgggtaacctctcccagtgtggccagcgaccccccaccctcccacgttctgaccactgtcctgggcaactagtgacatctagtgggggattttgtcccagtctgacctggcctgtaggggccttgggcagtcggacctgtgacccacgcttcctagcagtggctggactcctcccccttcccgcaggtgccctggcctcttcccctgccctcctcacctgctctggccagtctgactcctcccttccccacaaggttgggagggaatgaaggagagagcgggaaggaggaagggagggtggcattcctgggattccctggatagggggaagagtgggagggccttccatgggtgagcaagcagagagggcaccccgtaccccacccccagccccatcatcgaagcggcctaggaggacctggatttgaagaccattgaaaataagagattaaaccggttgattccaggctactggtcagacgaggaaagcagcccagagcactgaccacaggggaaaacatctccgggcatactgggagcagctgctgggggccactggtcaggctgcgggggtcactggttggactgggagaggccagtgcaggccactcggacggcacgcttggggccattagttacactgggagaggccatcgcaggccacaggttgcagtggggtcctctggttaaaatcgacgatgccagcccaggctgctggtcacagtggggacgagtccccaaggcccctggtcagaataacgaggagaaggtccgcgattgcctggtgagatcccagctcgggtcactggctacgctggtcgatcaggccccccgctgcaggcgctggtcagtaagcccggacagctctaggcttgggggcggacgagccccgagcctggccccgtgcactgggaggtccgctccgggcagtgggaggtcctggccccgcgcccgggcatcgggggacgaggggggcctggagggcggggcggggcggggctgccgggggcggggcctctggctcccagccccgcagcggccgagctgcagcccgggctcagtctccgccgccgccgtgaacatggagcccccggacgcaccggcccaggcgcgcggggccccgcggctgctgttgctcgcagtcctgctggcggcgcacccaggtatggctcgggctgagggcaaggtgggactggggagaggcccctggggaccccgggaaagcgaggagaaagggctttaccctgaccccaggaagcaaaatgtggggaccccaaggaggagggatatgggagtgttggaaggtacgccttccagtgagagagatctggggacagccaggcaggagagctggggatacccaggcggtggatcagagacaaccagagaagtcagcccccttcccactcagcaccctggaatctgggtcccacctgcctcctccctcagaccctggaatctgggcccccagcccctctttcctcagacccaggagtccaggcctccagtggctagaatagcttcccccagggcacagaggatcaaaaccccagggctctctccctcaaaggtcctcaagttttgagaggtccagggaccccttagagaagcgaggaccatgtgtccccacaccagcgatccacatgtatttaggagtttccagagtccagtataaagaacccgcctccctcaggaaagggctggagcaccagccccgggcagtgacagtggaacaaagtgtttccaagtgacaggcccccttcctggggcctcagctacatttacacacctgcatgaggatagaaggagaggaggccgggggctggggggtgggggtgggggtgctggggacagagggacagagagatgagagagattggggaagagagaggaactctctgcctccacttgtctgcagatcagacccagccttaggcaccagcctggaccccgtcacccctccctggggacaggctggggccagaggtgagcgcttgggaatccaggcccctggcacactcatggtcaacagtgggtccccaggggtagggctgggccagattgagcagagaagggaagggagtttctaagaagcactgagagctgatgccaggatgccagcccagagggtgagggagggtggtggtttttctacaataactactccaccaggccccagcctcctcttccctctgatcccaggagtccaggtgcccagcttcccaagatcctgggcctcaaccttatccttttgcaagatgactcgacttatcccgtttgctgttgtatcaaactgaggggggccaagaggcggctgggggctctggctccaggccgggcaggtctcagccagcctgtccctcccacattcctgaaacctgcccagccctgtcccccctcaccgcccccacacatccatcccgcctaagctccgggcccagccgcagcccacaccccagcccctcactcatgggagagcggaagagacccagggactgagtggtgcaggtgcagagagaggcagagacagggacagagatggagacccaagaggagagacacacgcaaaggtggagaccaggatggagagaaacatttatccatcatcacagaggtggccctgcccagggtgctggaggcaaatggctgagccaggcctggccctgccctggggggtggcgtgtgctctgttgggataagcaaaggctggtgcagtattaccccaggagtgttcagcggaggccacagggccctgtgcagcccagaggaggagccctgagctctgcaagtgcagggagagatggatttgagacccagagatgcagggagaagggatggagggcgaaaggatctcagggaggaggggctggggcctagactcctgggtctgagggaggaggggctggggcctggactcctgggtctgagggaggaggggctggggcctagactcctgggtctgagggaggaggggctggggcctagactcctgagtctgagggaggaggggacaggggcccagattcctgggtctgagggaggaggggctggcacctggactcctgggtctgagggaggaggggctgggacctggacgcttgtgtcctgggggagaggggaccctgtctggagggctcttcctgttggtgtggtggatgatagctcagttgctctcttgcagatgcccaggcggaggtgcgcttgtctgtacccccgctggtggaggtgatgcgaggaaagtctgtcattctggactgcacccctacgggaacccacgaccattatatgctggaatggttccttgtgagtgcttggggctggggggcctggagtcagggcacagcagggcagcaaaggttcattctctcatcagtgcctaaggcctgtagagatccaccaagccacactccttgttacagatggggtcactgagtcccactgaggggaagggatctgcaaggtgccccgtgtctaggcacagccaagtctagaatgacattgacctgctctggactgcgggctcttgagagagagaacagagacagacatcaagaaagcagaagccaggcacggtggctcacgcctgtaatcccagcactttgggaggccgaggcgggtggatcacgaggtcaagagatcaagactgtcctgaccaacatggtgaaaccccgtctctactaaaaatacaaaaattagctgggcgtgatggcatgtgcctgtaatcccagctactcaggaggctgaggcaggagaatcgcttgaacctgggaggtagaggttgcagtgagccgagatcgagccaatgctctccagccaggcgacagagcaagactctatctcaaaaaaaaagaggaaagaaaatgagagacaatcgggagagggagagaccaagaggagaagggatgggaccggaatgagatggagaaaaggagacaggaaaaatcaagaactgatagggaatgggggcaggagaaggtggggagggacagagggaccagggagacccataacaagaggaaaagaggcagagccaggagctgcagagagaaaggacccagagagagagagactgaggagcgctgggacacccggagctgagagcctgccccgcgcccacagaccgaccgctcgggagctcgcccccgcctagcctcggctgagatgcagggctctgagctccaggtcacaatgcacgacacccggggccgcagtcccccataccagctggactcccaggggcgcctggtgctggctgaggcccaggtgggcgacgagcgagactacgtgtgcgtggtgagggcaggggcggcaggcactgctgaggccactgcgcggctcaacgtgtttggtaagtgtcctcgggcatcccccgaagggaggcaggcagggaggggcgcagggcaggggctcctgacgtgaacgtctttttcacagcaaagccagaggccactgaggtctcccccaacaaagggacactgtctgtgatggaggactctgcccaggaggtacctctcgggtggaccttggccccagggtcctggaggaggaggggacagggccctggactcctgggtctgagggaggaggggctggggacccctgggtaataaaggaggaggggtaaggccaggcgaggtggctcatgcctgtaatcccagcattttgggaggcagaggcaggcggatcacctgaggtcaggagttccagaccagcctggccaacataatgaaaccccgtctctactaaagatacaaaaattagctgggtgtgttggtgtgcaactgtaatcccagctgctcgggaggctgagacaggagaatcactcgaacccagaaggcagaggctacagtgagctaagatcacaccactgcactccagcctgggccacagagcaatactccgtctcaaaaaaaaaaaaaaaaagaagaagaaaagaaaaaagaaaggaagggcagagggggaagactcctgtgtcctaggaaggagagagctgggggacccagaatccttggtccctggaggatggtgctggaggcctggactctttagtctgagtcggggactaggaatttggactcctgggtcctgggagagtcgggagttaggagcccggctcatgagtctgagtggggagaactcctgagagaggagccccgacttcagagtcccagctccaagcccagggccatgcccgtgtctgcctcagatcgccacctgcaacagccggaacgggaacccggcccccaagatcacgtggtatcgcaacgggcagcgcctggaggtgcccgtagagatgaacccaggtgagcagcgcaggagcgcggcgggacgtgggctggggtgggtggcggggctatggcctggctgactgccacctcccccgatctctcccagagggctacatgaccagccgcacggtccgggaggcctcgggcctgctctccctcaccagcaccctctacctgcggctccgcaaggatgaccgagacgccagcttccactgcgccgcccactacagcctgcccgagggccgccacggccgcctggacagccccaccttccacctcaccctgcactgtgagtctgtgctggcctttgacctctgacctcaggctccacacctcatgaggcctgaccctccacccgggggcttcacactcccctctgaccctctgcctccctacttcatgctaaaaaaaaatgtgctagtgctggccactgacctctgacctcaattggtcgcacaagccccatcctgacctctgacctccgacctccacttagcaccctggaccccatgaagtttatgactaaatggtgctttccaccttctcacactgaattgggtccccccatgacatctggctccaagtctcacactgacccatcgcccatacggacctctgactcttgacctatactcttagtttatttcaacctctgaactctggcactcagaataattgtgaacctgaggcttgaaacctatgacccgtaacctttgacccgccatagccctcacctgggatgcagggctgacctctcgcctgtcctctagccttgacccttcccctgatcacaattcccatctccctgcccttcccttagatcccacggagcacgtgcagttctgggtgggcagcccgtccaccccagcaggctgggtacgcgagggtgacactgtccagctgctctgccggggggacggcagccccagcccggagtatacgcttttccgccttcaggtgacccacccaagggtccctctgggatccaccccccagcccctgacctctgtgacctgctaacctgcataacttctaatgtgggacctgggagtccccatggcttaggcagccacctgatctggtggcccacgaactaaaaggacctctgacccctgatttgagagagtcaggacttagcatgccacctgacttgatggcccctgacccctgattctggcttagcatgacactaacctggtggcttctgacctagcatgagcccgctgaaccggggtggcttctgagcctggttcctcgtcccccgtctcccaggatgagcaggaggaagtgctgaatgtgaatctcgaggggaacttgaccctggagggagtgacccggggccagagcgggacctatggctgcagagtggaggattacgacgcggcagatgacgtgcagctctccaagacgctggagctgcgcgtggcctgtgagagccctgggtgaacgggcgggcaggaggggccctggcatcagtgcctctgcgccctcctccctacagccctgaagttgctctgtcatcccaaacactctgccttcaaccctttctctgcatttcttgggggtttttttggttgtttttttttttttttttttcccagagacaggacctggctacgttgcccaggctggtctcgaactcctcatgcgatcctcctgccttgctctcccaaagtgctgggattacaggagtgagccaccgcatcttgtcgagagctctttccatagcacagacctgaccctcctctgctcagaatctgccatggctccccagtacccttgggagaagcccaggtgtctcaccatggccttcaaggtccacctggccagttccaccattagctagctgatccttctccccagtcaaggctatctcctcatcaccccccaggctcctctggttcctaccttcactgcccatccttcctaccgtctatttctcaccaatcccttgaatcccaggcttctaagaatgattttcagttcattcgcatccaggccctggggaaaggctgtattctcccttggcacttcttacatatcccttcctggggtagaccctgcgccagatgctggggacacatctgtgaacaagacagaccacccctgttatttcagtaggggagacagatggtaaatgctaactaagccctttcgtaacagtagtgtatctacaggtgatatcaccagtgagagagagcaggagaggggattattttaggtggcaggtgttgcagtctgctttcctgagaagcagattctgacttggatgttttcaggcaagaagtttatgggaagtaccctgggttccgcacctcttgggtctagggaggtaaaggaagcaagatttggcaaggtgagaagttggactgaagtctaaggaaggtctcaggctgggtgcagtggttcatgcctataatcccagcactttgagaggctgaggcaggaggattgtatgagcctaggagtttgaggccagcctgggcaacagagggagaccccatttgcacacacacacacacaaattaaaaattagccaggcatagtggcacacacctgtagtcccagctactcggaggcccaggtgggaggatcccttgagtctggaaggttgaaactgcagtgagccaagattgtgccactgcactccagcctgagcgacagagaaagaccccgtctcaggaaaaataaaaataaaaaagtaggccgggccccgtggctcatgcctgtaatcccaacactttgggaggccgaggtgggtggatcacctgaggtcaggagttagagaccagcctggccaacatagtgaaaccccctctgtactaaaagttagccgggtgtggtggcatgcacctgtaatcccagccactcaggagcctgaggcaggagaatcgcttgaacccaggaagcggagattgcagtgaactgagatcgtgccattgcactccagcctgggcaacagagtgagactccatctcagaaacaaataaaagaaagaaagagggcctcagtcagccccacggggtacttggaatccaggatggcccttcacagttgtccccagttggggtgagggggctgggccttaataacctctacatcaaccagtcctcagaggtgtgctggccttaggcaaggggctctcagcagctgaggcagctcccagagaggggtgacagctgcaggctgacagctgtcatccttcttagcagctggtggaataagtccttccgtgctgtaggaaagatctgggtgtccacaataggggaggtcagggaagcctctgagaagagacatttaagtgagactcagaaaagcagacagcagccaggcacagtggctcacacctgtaatcccagcactttgggaggccgaggcaggtggatcacctgaggtcaggagttcgagaccagcctggccaacatggtgaaaccccatctctactaaaaatataaaaattagccaggcatgatggctggtgcctgtaatcccagctacccaggagactgaggcaggagaatcgcttgatcctgggaggcggaggttgcagtgagctgagatcgtgccactgaactccagcctgggtgacagagcaagagtctgtctcaaagaaaaaagaaattggccgggcacggtggctcacacctgtaatcccagcacttttgggaggcagaggcgggcagatcatgaggtcaggagtttgagaccatcctggctaacacggtgaaatcccgtctctactaaaaatacaaaaaattagctgggcgtggtggcaggtgcctgtagtcccaggtactcgggaggctgaggcaggagaatggcatgaacccaggaggcagagcttgcagtgagctgagatcccgccactgcactctagcctgggcgacagagccaaactctctcaaaaaaaaataataagaagaagaaatgcagagagctacaaaaagagcactgcaagtagagtgagcaagtgcaaaggccctgaggcaggccccaacttggtctactcaagaaaaacagcaagagaacggggtagctgggagcacaggaggaatggggaagagtgggagatggttcaagaggtgggtgagggccagaccaggcagcatcttttaggcaccctcaagaagtttggcctcgatgccaagggtactggggagccactgcagggttttatgcagaggggagggatgaccagtgggtggttggttttttttgtttttttttttttgagtcagagtctcactctgtcacccaggctggagcgcagtggcacaatctcggctcactgcaacctccacctcccaggttcaagcgattctcctgcctcagcctcccaagtagctgggactataggcatgcaccactatgcccagctagcttttggatttttagtagagatggggtttcaccatgtgaccagggtggtctcgaactcctgacatcaggtgatgcacccgcctcggcctcccaaagtgctggggttataggcatgagccaccgtgcccggcctgaccagtggatgttttaaagaggtccctctagctgctcagtggaggatggacaagagggaggagcaggctagtgaagaggtggttgggacagtcaaacctggggccagaggtggcaggaagccagaggatttgtcctgggagcagaccagataaagacttgctgaggccaggagcaggggctcacgcctgtgatcctagcacttttgggaggtcaagacaggaggatcacttgaggccaggagtttgagacccagcctggccaacatagcaacaccttgtctctattcaaaaacaaaactttgcagaaaagatgtttgggggtaacagggaggttaccccacaggttggggtttgagcaaaaggtttgtgtgctaaagtcacagaagggacaccttccacacctaaggttattcattaaccttgggctcagatgtcagctctgaagaaaagtaattgacttgggcatgtcaatgttggggttagactgctagatttttggttggagagcctggatgggagaatggagatttcatggagatggggtaaaccaggaggattacttgctgttctctgcttccaactgtccattcatgtttgcacccccgaccgcccctggagagcccctaattgagtgggtggcggtctgggacgagtgacagactgtcccccactgcagatctggaccccctggagctcagcgaggggaaggtgctttccttacctctaaacagcagtgcagtcgtgaactgctccgtgcacggcctgcccacccctgccctacgctggaccaaggtgagagggagaggagccccctcgggccctgcactcgcaccctcctctctcccctcactcctcgccctctcacagcgtcctcctcctcctctgcccttcccaggactccactcccctgggcgatggccccatgctgtcgctcagttctatcaccttcgattccaatggcacctacgtatgtgaggcctccctgcccacagtcccggtcctcagccgcacccagaacttcacgctgctggtccaaggttcagggggcagggagggggtgggcttggatggggacagtgtggggtgtgggacctggacaaacaggacgagttcctgagtccctggctggggactccatcttctgctcgatgcctctcttctctctctctctcctctcccttcactttcttcccatccccaccacccacaggctcgccagagctaaagacagcggaaatagagcccaaggcagatggcagctggagggaaggagacgaagtcacactcatctgctctgcccgcggccatccagaccccaaactcagctggagccaattggggggcagcgtaagggaccttcctctccaccctgagccccctctcactcatccaagtatcacaccctcctttccacttcctgggagactggacgtcgttcacctctgcccttgaccccaccccttgaccccaccagccggggcctgatcggagcctccatagcccgcagagccaatccccggacggcagggttgggtgagcagctctctgaccctgaaagtgaccagcgccctgagccgcgatggcatctcctgtgaagcctccaacccccacgggaacaagcgccatgtcttccacttcggcaccggtgagtgactgaggtggtggcagaggagccgggtgtggggcagacagagcccactgcctgacccacgcctctctccatcctgtccctgcagtgagcccccagacctcccaggctggagtggccgtcatggccgtggccgtcagcgtgggcctcctgctcctcgtcgttgctgtcttctactgcgtgagacgcaaagggggcccctgctgccgccagcggcgggagaagggggctccgtgagtggcctgctatctgcaatgaccaccatagcttaaccccatccccaccctcaaccccaagctcaacccataacctcaaccacatcttatcctccaccccacatcccaccacatccacctccatccccaacccatcctcatccccaactacagccccaaacccagccccagactaatccacagccatccccaactcatcctcatccccaactgcagccccaaacccaacccagggccatccccaaacccatccccaagccaaactcaacaccatccccttccctaatcacctctcctgcccctagctcagcctcatccccaactccatgcctgtctccaatcccaaccctgcccccaatctcccctcaactccaatccataacccccttcaaaccatcctcaactaagctcctctccagccctggccacatccccatcctcccccaacctccagccccaacacccatcatccccctgagctcacccttaactccaatttatcctccaagcctatctctcaccatccagccctcacctagccatttcccaaccctagtcctccaccgtcccgaagccaacttcacccatgtccccatccccaatcttgtccccattcctgactccaaatccaacccctaagcctccccaagctcctcctcatctaaccttgtctccagccccaaccacatggccgtcctcacctccaatccgtaaccatcccagaccgatcccaaagccaactccagctacattcccacctccaaccccaatagcatctgcatccccatgcccaaccctaaccccagtgccattaccagcccctaccccatccctatgccatccccacccagcacacccccatcctcacctccatccccagccgcatcctagtcccacccacccccatcctcagttcctccccctgccgtgtgcacctccaacacgacgcctccgcccgctgcctcctccccccaggccgccaggggagccagggctgagccactcggggtcggagcaaccagagcagaccggccttctcatgggaggtgcctccggaggagccaggggtggcagcgggggcttcggagacgaggtgggtgagggcctgggccccctggtgagagggacctgctgggcagtggagcacgcccgtgggcacaggctgacctctccatccgctccccagtgctgagccaagaacctcctagaggctgtccctggacctggagctgcaggcatcagagaaccagccctgctcacgccatgcccgcccccgccttccctcttccctcttccctctccctgcccagccctcccttccttcctctgccggcaaggcagggacccacagtggctgcctgcctccgggagggaaggagagggagggtgggtgggtgggagggggccttcctccagggaatgtgactctcccaggccccagaatagctcctggacccaagcccaaggcccagcctgggacaaggctccgagggtcggctggccggagctatttttacctcccgcctcccctgctggtccccccacctgacgtcttgctgcagagtctgacactggattcccccccctcaccccgcccctggtcccactcctgcccccgccctacctccgccccaccccatcatctgtggacactggagtctggaataaatgctgtttgtcacatcaacaccatcctgtggccagagcttcctctgggagtagggaggggaagggcgatgcaggtgattccctgctctcagctgcccccccatccgcccccttgcaagacctcagaagacgcctgatgtcatggagaaagaaatgagacagggctgggcgccgtggttcattcttgtaatcccagtggtggtggctcacgcccgtaatcccagcactttaagaggctgacactggagggtggcttcaggccaggagttcaagaccagcctgggcaacatatggagaccccatcgctacaaataataatactaataatacagaaattagccaggtgtgcctatagtcccagctattcaggaggctaaggtgggaggattccttgagcccaggaatacgaggttacagtgagctatgatcacgccattgcactccagcctgggtgacaaagcgagacttcatctctaaaaaaaaagaagaaaacaaaaagaggccaagctcagtggctcaaacctgtaatcccagcactttgggagaccaaggcagggggatcactttaggtcaggagtttgagaccagcctggccaacatggtgaaaccccatctctactaaaaatacaaaaaattagccaggcatggtggcgcgagcctgtaatcccagctacgtgggaaactgaggaggagaaaatcttgaacccaggaggcagaggttgcagtgagccgatatcgcaccactgcactccagcctgggcgacagagcgagacactccgtgaaaagaaaagaaaaagaaatgacagcatgagagcgagtgagcacgcagagggcgacttagctggccgggggtggacggaaagatgccaggtcccgagggtgctgggcttggcccccgaggaccagcgtctgcctggagatgggtgctgtccccttaagtaaaagttcccagtctgtcttgccagagccccagagggaattgaaactgggcgaggaaaagctccctcttagctgtagagtcaatagaattagggatggagccacctcctctggggaggagtccctggggaaagcggggagcttggaggaatccagagaaaagggggcctggggcagagaggacacacagacattacaaggccaagaaagagggacgtgagaaagggatggaaagatttagggggaggcaagagggatgggttgggaagctccgagagagccctggagtaagagacaaaaatagatctggggagacagacaaaaagagtagtgggccaggtccagtggctcatgcctataatcccagcactttgggaggctgaggcaggaggatctcttgaggccaggggtttgagaccagcctgatcaacataccaagaccccatctctacaaaaaataaaaaattagccgggcatggtggcacacgactgcagtcctcagcacaggcaagaggatcacttgaggccagcagttcaagaccagcctgggcaacatagtgagaccccatctctacaaaaaaataaaaaattagctgggcatggtggcaaacacctgtggtcctgcactttgtgtgaccaaggcaggtggttcacttgaggccagtagttcaagaccagcctgggcaacacagcaagaccacatctctacataattttttaaagagaaatacagagaaagaagaactggagttagagagatcattgcagttggaaagggagagaggaaatgcaagcagctgcctagaaggacggaggagggtagcgggaggtcagcacgggtgactggctggcgacctcacctctctgagcctttcttgtgcatcgaatggggatcaattgcactttggccacggcgggctgctgtgaggtgtcagtgtgatcttagagccatgtggggtgatgggggcattgcactcacacaccacccagggcctcctagcattgccttctcaaatctcaggcacgcagctccactctctgctctcagtcacctcagccacaaagtggacagagtgggatctgtcaccataggaaattattcggatgccacagaagcctccttcctggtaggtaaaccaagcagcctgcccaggcagaagagctcatgggccacgttaaggcgctcagatcccatggtttattgaattcatttaaaacaaacacaaggttattgtttgtttttcaactgtgtggtggtaggaagtgctcctgacggttttcccatggcaataatttactccttgatttcacccaccactactgtgacagctttctctcactgattcacccaaaagtgggcttttctttgtcattcattcttttttttttttttttttttgatggagtgcagtggcaaaatcatagctcactacctcaaactcctaggctcaagtgatcctcctgcctcagcttgctctgcagctagacccacaggcacatgccatcacacccagctaaatttttatttttattttttgtagagacaaggtctcaaactcctggcctcaagcaatcctcctgcacaaagttttaggattacaggtatgagccaccatacccagcctaaaaaaaaaatttttatttttttatttttttgagacagggtctcactctgtcacccaggctggagttcagtggcaagatctcggctcaccgcaacctccacttcccaggctcaagcgattctccagcctcagcctcctgagtagctgggtctacaggcataagccaccaactcctggctaatttatgaattttttgttgagacggggtttcaccatgttgcccaggctcgtcttgaacttgagctcaaaatgatctgcttgccttggcgtcctaaagtgctgggattacaggcctgagccactgagcccggcctctaaaaaactttgtattaacaactttcttcttccaaaaaacctgcagttcccactcttgtcaatgtgtgtgaggtgcccattactccatactttggccagcacttgcaattatcctctaaatttttgcctacttgatgggtaacaaaatggctctcatatttgtgtctctttttttttttttgagacggagtttcgctcctgttgcccaggctggagtgcaatggcacaatctcggctcactgcaatctctgcctccttggttcaagcaattctcctgcctcagcctcctgagtagctgggattacaggcacccgccactacgcccagctaattttttgtatttttagttgagacggggtttcaccatgttggccaggctggtcttgaactcctgacttcgtgattcacccacctcggcctctcaaagtgctgggattacaggtgtgagccactgtgcccggcctaatttttaggcggggtttcaccatattggtcagtctggtcttaaaactcccgacctcaggtgatccactcgcctcagcctccaaaagtgctgggattacaggtgtgagacaccgtgcctggccgataatttggtcttgaggtccctttcatgagcatggccatagactctggctttgccctgcctgggctccaggggattagatcataagtgtttacaatgtgcttttcagcagattttcctttatcctggcaggcagcccaatgcctaagtgtctgacttgtacacaggtgtccctctcacaggaaatgtatttatactggccaagaccctttgtggctcttatctgacctgtgtccagtttattccaaaccaggaaagtcattaggttcaggtgtgtcagtcaagtgacacacacaaaggaggcaactcaacaaaacacatgaaatatcagaaagaggcagggtgcagtggatcacgcatataatcctagctcttcaggaggccaaggcaggaggatcacttgatgccaggagtttgaggccaacctggccaacatggcgaaaccctgtctctactaaaaataaaaaaattagccgggcgtggtggtgtgcgcctgtagtcccagctactcaggaggctgaggcaggagaaccacttgaacccaggaggtggaggttgcagtgagccaagatcatgccactgcactccagcctgggcgacagagggagattctgtctcaaaaaaataaaggaagaagaaataacagaagcagaggctggacatgatggctcacacctgtaatcctagcactctgggaggccaaggcaggaggatcagttgaactcaggagttcgagaccagcctgtgcaacatagcgagaccctgtctctatttaaaaataaaaaaagaagaaagaaagatataacagaagcagtttattacttatggatcccagagagaaaagagcagcacacttccctgggccagtgggaagggggcagctgcctgagacatgcaggctcaaccagcaggtggagagagacccccccaaagcctttactgcggtccagggcatggcggagacggagttccccaggagagttctaactgatgggtttagaacaagcaggcacaagaattccatagagacacactgtgatggaggttgtcatatctgcacagtccattcattggaggtgtggggatcagtagcttgggtcaagtagtttgtatctatctagctgtcccatacagagatggtcccatacaggaggaggtgagataaagctgataccttgatcaactccagtaagaaactggaaggagagccgggcatgatggcttacacctgtaaacccagtgctttgagaggctaaggcaggaggattgcttgaggccaggattttgagaccagcctggacaacataatgagaccctgtctctaaaaaagaaatagagagaaggaagagaggcagggagggagggaggaaggactgggaggaagtatagagctggaaactgtgtcaaggataactaagtccagattttggcatgagaaagttaaacatattcagaatggatgctaagacaatatagaattatacaaattcaccacaatggcatattaatttgttttcatttgaatttccgtgacctctagtgtgaaaatggtgtttctctgtatgttcattggccatttgcttttcttgtttatgaactgtggtatactcttgcctacttttctctttttttttttaccttttcttattaatttgcaggatctctctacacaccaggaatattaacctctaatcttataaagcttttatctcaggctgggtgccgtgactcacgcctgtaatcctaccactttgggaggacgaggtgggtgaatcacttgagtccaggagttcaagaccagcctggccaacatagcgaaaccctgtctctactaaaaatacaaaaaaatagccaggcagggggtagccaggcatgcctgtaatcccagcactttgagagaccaaagcagacggatcgcttgagcccaggagttcaagaccagcctgaccaacatagtgaaaccctgtctctactaaaaatacaaaaaattagccgggcatggtggcgcatgcctgtgatcccagctactcaggaggctgaggcagcagggttgattgagcctgggagttcgaggctgcagtgagtcttgattgcaccactgcactccagtctgtgtgacagagtgagaccctgtctttacatagatatagacagatgatgatagatagatgatagatagatagatagatagatagatagatagatagatagatgatagatagatagatagacagatagatgatagatagacagacagatatccacatagatacctcaaacctattatgtcccaaatcgacctccagtctttcctctcgcataaatggtatccctgccctccagctgggtgagcccaaaacttagaatttatcctggattcctccatttcctttacctcccactcacataacccaaaggcacatcccatgggtcccctcccatacagctctctttcctgaccacttatcccccggcttcccatattcaataaaccttttaactctataccctgccacagggcatagagctgcagctagctctttctacaaatggtttcacggccatcagtccaaacatacatcttctttcacctggatcaatgcacttataaaagcaaatgctcaacagcaatctttgatggctctaatactcacatcaattaaaaatttaaacgttacctttcagtcacccttcccatccttttaaagtggaattcctaaatctaaaatggtaaaagttaaaaaaaaaataaaacaccaagctcatatggctctataaaatacagaataactttaaaatgtatcttataggcggggctgggcatggtagctcacgcctgtaatcccagcactttgggaggctgaggcgggcggatcacaagatcaggagattgagaccatcctggctaacacggtgaaactccgtctctactaaaaatacaaaaaattagccgggcgtggtggcgggcgcctgtagtcccagatactcgggaggctgaggcaggagaatggcgtgaacccaggaggcggagcttgcagtgagctgagatcatgccactgcactccagcctgggcgacagagcgagactccatctcacaaaaaaaaaaagaaattatcttataggcaatactttcacttgtcaattctctttatttatttatttattttttgagacggagtctcgctctgtcgccaggctggagtgcagtggcgagatctcggctcactgcaacctccacctcccgggttcaagcgattctcctgcctcagcctcctgagttactgggactacaggcacatgccatcacgcccagctaatttttttatttttagtagagacggggttccaccatgttggccggaattgtctcaaactcccgagctcaggtgattggcccacctcggccacccaaagtgccgggattacaggtgtgagccactgcgcccggccaattttttttttttttttttttttttttttttttttttttgagatggagtcttgctctgtcgcccaggccggagtgcagtggcgcaatcttggctcactgcaacctccacctcccgggttcaagcgattctcctgcctcagcctccagagtagctagattactggcgcatgccaccatgcccagttaattttagtagagacagagtttcaccgtgttagccaggatgatcttgatgtcctgacctcatgatctgcccacctcagcctcccaaagtgctgggattacaggcgtgagccaccatgccgggccaatttttttttttaagatgtagtcttgttctgttgcccaggctgacccattgctctcatgtatgtttgtttgtttgtttgtttttgagacaggacctggctctgtcgccgaggctagagtacaatggtgcaatcatgacttactgcagcctcgaccttgggctcaagtgatcctcccacctcagattccccagtagctgggactacaggtgcattgccctcaggcccagctaatttttgtattttttgtagagatgggatttcactaagttggcaaggctggtctcaaactcctgacctcaggtgatctgcccgcctcagcctcccaaagtgctgggattatggacatgagccaccatgccctgcctataactgcttttaaacataattttatacttttccaggagcgtcctaatgcatacgtgtactgcgtattctcgaaatttatgcttttttaaaacataaaccaggcctggcacggtggctcatgcctgtaatcccagcactttgggaggccgaggcaggtggatgatctgaggtcaggagtttgagaccagcctggctaacatggtgaaaccccgtttctactaaaaatacaaaaaattacccaggtgtggtggtgcgcacctataatcccagctacttgggaggctgaggcaggagaatcgcttgaacccagggggcagaagttgcggtgagcagagatcgcaccattgtactctggcttgggcaacaagagtgaaactccgtctcaaaaataaataaataaataaataaataaataaatagcagattagaaacccgtctgtgactcaggttttctcatttctcttagaataaaattcaaactcctacaaaaggctgcgtgcatagtgcctctctctctgccatccctagcttcactttccttgcctgcatcctatcagacagtctgtctctccagcccttgaatattttgtttctttcctacctctttttttctttttttgagacagggtctcgctctgtcacccaggctggagtgcagtggtgtgatcatagctcactgcagcctcaaaccctggggctcaagcaggtcctcccacctcggcctcctcagtagctgcaactacaggcatgcaccaccacagctggctaattaaaaaaaaaaaaaaaaacttttacagatggggtttctctgtgttgactagtctggtcttgaactcctggcttcaagagatcctcctgcctcagcctcccaaagctctgggattacaggcatgacccatcacacctgaccaggactctcaaacttacccttcatttgtcctgaaatctttcactacagatcctcacgtaattcattcattctcatactgcagattttggctcaaaatagcacctagccagaaatgtctttcagactctcttattttaaggagctcttgccccaaacccacccaagttacttccatcatcctaagtattaatacttttgcttgattttgttcttttctagtttctgggttctatgcatagaccatttttactaatattcatattttcttttaaataccttagaaagatattttagatttcttcatttgagccatgcacattctttgaaaatttatcctaaaatagctgggcacccagcccatcccttgaacccaggaggtggaagtggtagtgagctgcgattgtgtcgctgaactccagcctgggacaccgagtgagactccatctcaaaaacaaacaaacaaacaaaaaaatgttgggcacagtagttcatgcctagtcccagctactcaggaggctgaggcacgaggatcacttgaggccaggagtttgagatcagcctgggcaacacagcaagacctcactctaaaaaaaaatgttaatgctaacatataactttggttctgtttgtgattggcatatggtttatattatactttttttttttatttgagatggagtctcaccctgtcgcccaggctggagtgcagtggtgtgatcttggctcactgcaacctccatctaccatgttcaagcgattctcctgcctcagcctccagagtagctgggattacaggcatacaccaccacacccagctaatttttgtattttttttagtagagacagggtttcaccatgttgatcaggctggtctcaaactcctgacctcgtgatccgcccgccttggcctcccaaagtcctaggattacaggagtgagccaccgcgcccagcaaaaagttttttaactagctgagtatagtggcacgagcctgtagtgccagctactcaggaggctgtggcgggaagagggaggctgcagtgagatatgatcgcaccactgtactccaacctaggtgacagcaagaacttgtctcaaaaaaaacaaataacttcggccgggcaaggtggctcacacctgtaatcccagcactttgggaggcagagtcgggtggatcccctgagaccagcagttcaagaccagcctgaccaacactgtgaaaccccgtctctactaaaaatacaaacaattagccaggcgtggtggccggtgcctgtaacctcagttactcgggagactgtgacagaaagatgaaggctgcagagagctgtgatcgcacccctgtactccaacctagatgacagcaagaacctgtctcaaaaaaatagacaaatacataaaataaaatcggagtgaagctaccaatgtaatgttgagtgagtgatatgtttcagaaaatactttctagatccttgatgtttaatacggtatccctagtcatatgtggctatagaaacgtaaactacttaaaactaaataaaatgtagaatctcattcttcagtgacaatagccacagttctactgctcaacagacaattgtggcttgtggttactatattggacagcacagatataaaacatttccatcaatatagaaatttcttttttattctttttttttttttttttttttttgagacggagtcttgctctgtcacccaggctggagtgcagtggggcgatctcggctcactgcaagcttcacctcccaggttcacgccattcttctgcctcagcctcccgagtagctaggactacaggcgcccgcaccacgcccagctaattttttgtatttttagtagagacggggtttcaccatgttagccaggatggtctcgatctcctgacctcgtgatccgcccgcctcagcctcccaaagtgctgggattagaggtgtgagccaccgcgcccggcccccagtacagaaatttctacagggtaatgcagatctagaatatgatcccattttaaaataaagtccatggccaggcatgttggctgatgcctgtaatcccagcactttgggaggccaatgcaggtggatcacctgaggttaggagttcgagacaagcctggccaacatggtgaaaccccgtctctactaaatctacaaaagttagcttggcatggtgtcgggcacctgtagtcccagctactcaggaggctgaggtgggagaatcacttgaacccaggaggcagaggttgcagtgagctgagatcgcaccattgcactccagcctgggcaacaagagcaaaactctgtctcaataaataaataaataaaataaaataaagtacgtatgtcacatgtgcgtttacatgtgtatatataaatatatttaacaggtttttaatctgttatgtgaattttttaaattttttcatacagtgtcactttattaagtgggtagaaaatgttaaatttttctttgaaacaaggtttcttttttggggggatggggggatggagtctcgctctgtcgcccaggctggagtgcagcggtacgatctcagctcactgcaacctctgcctcttgggttcaagtgattctcctgcctcagcctcccaagtagctaggactacaggcgcccgccaccacgcccagctaacttttgtatttttagtagagacggggtttcaccatgttcaccaggctggtcttgaactcctgacctcaggttatcctcctgcctcaatctgccaaagtgctgagattataggcgtgagccaccacacctgagacacggtttcttaaaacaaaagaaaaaaagagacagggtttcactctgtcacccaggctggagtaaagtagcataatcacggttcactgtagcctcaacatcccagggctcaggtgatcctcccatctcagcctcctgagtagctgggattacaggagcatgccaccacacctggctaatttttgtactttttgtagagatagggtttcaccatgttgcccaggctggtcttgaactcctgggctcaggcaatgcgactgcctcggcctcctcccaaagtgctaggattacaggcatgagtcaccacacctggcataaattattaaatatttaaaattgccaagttccttggagaaactctatttgactacattgtttattttttttaatatgctgcttcataacatctatttatttaaaaatttcttaacatatgatgcagcaactccccttctgggtatatatcagaaagaattgggtcgggcgtggtggctcacgcctgtaatccaagcactttgggaggctaaggcaggaggatcacctgaggtcaggagttcgagaccagccttgccaacatggtgaaaccccatctctactaaaaatacaaaaattagccaggtgtagtggcacacgcctgtaatcccagctactagagaggctgaggcagtagaatcacttgaacccaggaggcggcggttgcagtgagccaagatcacgccattgcactccagcctgggggatagagccagactctgtctcaaaaagaagaaagaaaaggaaggagggagggagggggggaaggaaaggaggaagggagagagggagggaggaggaaggaaaggaggaaggcaggaagggaggaagggagggaggaaggaggaagaaaaggaggaagggaaggaagggaattagaggcgtgagccacagcgcccagcttacattatactttctaacctactaatggcatcaaataaataggaaccggtatttgagaagcacatattataattggaggctgcagtggctcatgcctgtaatcccggcactttgggagacagaggtgggcagatcgcctgagcccaggagttcaagaccagccagggcaatgtggcaaaaccccatctctacaaaaaatccaaaagaattagccaggtgtggtggtatgagcctgtagtcccagctactccggagggtgagatgggaggatcacctagtcacaggaaggtggagactgcagtgagccgtgatctggccagtgcactccagcctgagccacagagggaaggacggaagggaaggaaaagggaacagtgacaaacagagaccagaaacacagagggatgctgaagcataaggaacgaaagacccagagatacagaaatttaggaacacgaagagacccaaagatagtgacagaaacagagagacagaggaaagtctagaaagaaacaatgcagtgacacccagcaccttcatgtatttatttatttacttatttatttattcattcattcatttatttattttttgagttggagtcttgctctgttgcccaggctggagtgcaatggcacgatctcagctcactgcaacctccacctcctggattctcctgtctcagcctcctgagtagctgggattacaggtgtgcaccaccatgcttggctaatttttgtatttttagtagagacaaggtttcaccatgttggccaggctggtgtcaaactcccgaccccaggtgatctgcccacctcggcctcccaaagtgctgggatcacaggcatgagccacctcgcccagccttatttatttatttagagacaaggtctcgctctgtcatccaggctgtagtgcagtggtgcaatcactgctcactgcaaccttaacctcccagggctaagtagtccttctgcctcagcctcccgagtagctgggaccacaggcatgtgccaccacgccaggctaattttttatttttgtagagatgggatctcactatgtttcccaggctggtcttgaattcctgagctcaagccatccttctgccttggcctcccaaagtgttaggattacaggcatgagacaccacgcccgacctcccacatctctctttttttttttttttttttttgagacggagtctcactctgtcgcccaggctggagtgcagtggggcgatctcggctcactgcaagctctgcctcccgggttcacgctattctcctgcctcagcctcccaagtagctgggactacaggcacccgtcaccacgcctggctaattttttatatttttagtagagacggagtttcaccgtgtcagccaggatggtctcgatctcctcaccttgtgatccacccgcctcggcctcccaaagtgctgggattacaggtgtaagccaccgcgcccggcctcccacatctctttaattttatatatttatatgtacatatatacacgcatatatatttatatatgtataaataaatacatacatatatatgtgtatatacacgcgcacacacacacacatatatatagaagcttttactttaaagctttgattattgctaagtttattttcattgtctcaagatctgtttaaccctggagccagactgggtcagtgggtctgtgtggtgcctcatgtacctgtctctgccccttgaagttctgtttaccacctccaagaggcatagcctgcagtctcagcaaaaggatagattcccaggaagagtgcgagagaggtttggggcccaggtgggcagcccacccagctgaccccaccaggtgggcatgatatcatgatatcaaatatgctaaatttgtgtctgtgtacatcatgttctggccccagggaaatgagcactttgctggtgaggttggtgacattttgtttaccatctatgcctgaggaggaaagactggaggaaagaaagacctaagaggccagtttatattcacaaacatggaagtcaagcctgttccacctttccaatgcaatagagcacctactgggaaagccatgcctggccagcccctggcaaaacacacctgaggattcattcctccattcacgcaatcataccttcaagaaaagttcagagggcgtggtggctcgcgcctgtaatcccaacagtttgggaagccaaggctggctgatcacctgaggtcaagagttcgagaccagcctggctaacatggtgaaaccccatctctactaaaaatacaaaaattagcctggcattgtggtgcatgcctgtagtcacagctactcgggaggctgaggcaggagaatcacttgaaacttggaggcggaggttgcagtgagctgagatcgagtcactacactccagcctgggtaacagagcgagactccgtctcaaaaaaataaaaagtgtattgagtgtttactgtgtgccaggcactggggagacatcaatgaacaaacttcacaacccaccaggcacagtggctcacgcctgtaatcccagcactttgggagctcaaggcgggaaaatcacttgaggtcaggaattcaagaccagcctgggcaacacagcaagatcccatctctacaaaaaaatttttaaattagccaaacatggtggcacacacctgcagtccccactactcagagtgggaggatcgctcaagtccagaaagtcaaagctgcagcgagctatgatggcattactgtactccaggctgggagacagagcaagatcctgtctccaagacataataataataataataattcacatcctaatggtgttgctggactccagtggggaaagtggtcagtggaattccttagaaggtccacagacctaggaagagacttcaggaactgcaaccaatccctgactctctagggcctgaggaggcacttggatgggaacaccctccacctcccaagagaagcagttgactcctccacgaggaagcactggacagccaggaggtgcctcttgttaaccaaagtgggctgttgaccttgaactccagctcagagatcttgtccctggtcttgttctcaagactcatcaggttctctytttctctggacatggaatctagatcttcaattttgaagccaaatctatgggagtaaaacaaagagatttgattaaaacaaaagatgttgtgcaaaactcaaaaaataaaacaggctgggcgctgtggctcaggcctgtaatcccagcactttggaaggccaaggcaggaggatcacttgagcccaggagttcgagaccagccctggcaacaaacagagactctgtctctacaaaaaatgcaaaaattagcctgatgtggcggtacacgcctgtagtcccagctactcgggaggctgaggtagggggatcccttgagcctgggaggctgaggctgcagtgagccgtgatccagccactgcattccagccagggcaacagagcgagatcctgtctcaaaaaataaaataacagtagtcccagcactttgggaggtcgaggcaagcagatcacttgaggtcaggagttctcaaccagcctggccaacatggtgaaaccccatctctactaaaaatacaaaaattagccaggggtaggggggcacacctgtaatgctagctactggggatgctgaggcatgagaatcacttgaacccgggaggcggagtttgcagtgagccaagatcacgccactgcactccagcctgggcaacagggcgagactccgtctcaaaacaacaacaaaaataaacatgagaagctagatgactgtagctggctgatcacctgcttggcagccacagcttttacctgtgtcttgggcttgggactcatggagcagagtgggtgtcgcccacaggacgcatgaatgcttggagcttactggatccctgcatccctcccatctgtgttcagctcacattcttagtatgtctaacaggtctcatgagttgctttttttttttttttgagacggagtcttgctcagttgcccaggctggagtgcagtggcgcgatctcagctcactgcaacctccgcctcccgggttcaactgattctcctgcctcagccttccgagtagctgggattaccggcgggtgccaccacgcctggctaattttttgtatttttagtagagacaagatttcaccgtgttcgccaggatggtctcgatctcctgacctcatgatccgcctgcctcagcctcccaaagtgctgggattacaggtgtgagccaccacgcccggcttgagttgcttcttaatatccatccttcatttcacctgtctgtgtccttatttatagggctcttgttccctatataacagaattgaaaattccctttaaaaaaatacagcaaatgcacacagaggatcagaggatggaggggagaatttgatgagataaccagggaagtatttagtacaaagcctggcacagagtccatgtgcagtacatgttaattattgtgattatctaaggaaaaataaagagacacagagaaaagcaaaaaggttgccttaggccaggtgcggtggctcacacctgtaatcccagcactttgggaggccgaggcaggcagatcacctgaagtcatgagttcgagaccagcctggccaacatggtgaaaccttgtctctacaaaaaaaaaaagacaaaaattagctgggcatggtggcacgcgcctgtaatcccagctactcaggaggctgagacacaaggatcacttgaacccaggaggcggaggtggcagcgagccgagatcacaccactgcactccagcctgggtgacagggcgacactctgtctcaaaaaaaaaaaaataaaggccaggtgcggtggctcacgcctgtaatcccagaactttgggaggccgaggcaggcagatcacctgaggtgaggggttcgagaccagcctggcaaacatgatttagtagaaaccccgtctctactaaaaatacaaaaattagctgggcgtggtggcaggcacctgtaatcccagctactcgggaggctcaggcaggagaatcgcttgaacccgggaggcggaggttgcagtgagccgagatcacaccattgtacgctagcctggggggacaagagcgagacttcgtctcaaaaataaataaataaataaacaaataggctgggcgcagtggctcacgcctgtaatcccaacactttgggaggccaggcgggcggatcacgaggtcaggagatcgagaccatcctggctaacacggtgaaaccctgtctctactaaaaatacaaaatattagccagcatggtggcagacgcctgtagtcccagctactcgggaggctgaggcaggagaatggcgtgaacccgggaggcggagcttgcagtgagccgagatcgcgccactgcactctagcctgggcaacagagcgagactccatctcaaaagtaaaataaaatataataaaataaaataaataaaatacaaacactcccttagtccagggcagggaccagatacagagataccactctaaaggcagacattggtgttggggtttggtgagttggatggcgagtgaacagatggctagtgggaagggaaagagaagaggaaagggttctccatccagtacctggtccccaagttaatgagtggaggatcccagcctgccccaccaggagggaatacatttgcataaggtccctcatctgcatggcatcccagggaatttgcatagagatggcagcctggggccacatcagtatgacccctcctcccaagggttgaaactccagcctacattacaaaggcctagggcaataggaaagtgggaggggtgaacctcaggatctggggctccaggaagtaaagagaagttggtagtaaactacccttgctctttaaccttctgtggttcccagagcatgagccgcccttcagctggcattctggaccttctaagatactgaccctcacatcccctgctcccgctgtcaccaccctcctacctggaatgcccttccccatatcccgtgctgtgacaaagcttgcctattcttcaaagcctggacatcctgaagaattc

SEQ ID NO: 27 - DNA, 153142 bp, Homo sapiens
gaattccttagaaggtccacagacctaggaagagacttcaggaactgcaaccaatccctgactctctagggcctgaggaggcacttggatgggaacaccctccacctcccaagagaagcagttgactcctccacgaggaagcactggacagccaggaggtgcctcttgttaaccaaagtgggctgttgaccttgaactccagctcagagatcttgtccctggtcttgttctcaagactcatcaggttctctytttctctggacatggaatctagatcttcaattttgaagccaaatctatgggagtaaaacaaagagatttgattaaaacaaaagatgttgtgcaaaactcaaaaaataaaacaggctgggcgctgtggctcaggcctgtaatcccagcactttggaaggccaaggcaggaggatcacttgagcccaggagttcgagaccagccctggcaacaaacagagactctgtctctacaaaaaatgcaaaaattagcctgatgtggcggtacacgcctgtagtcccagctactcgggaggctgaggtagggggatcccttgagcctgggaggctgaggctgcagtgagccgtgatccagccactgcattccagccagggcaacagagcgagatcctgtctcaaaaaataaaataacagtagtcccagcactttgggaggtcgaggcaagcagatcacttgaggtcaggagttctcaaccagcctggccaacatggtgaaaccccatctctactaaaaatacaaaaattagccaggggtaggggggcacacctgtaatgctagctactggggatgctgaggcatgagaatcacttgaacccgggaggcggagtttgcagtgagccaagatcacgccactgcactccagcctgggcaacagggcgagactccgtctcaaaacaacaacaaaaataaacatgagaagctagatgactgtagctggctgatcacctgcttggcagccacagcttttacctgtgtcttgggcttgggactcatggagcagagtgggtgtcgcccacaggacgcatgaatgcttggagcttactggatccctgcatccctcccatctgtgttcagctcacattcttagtatgtctaacaggtctcatgagttgctttttttttttttttgagacggagtcttgctcagttgcccaggctggagtgcagtggcgcgatctcagctcactgcaacctccgcctcccgggttcaactgattctcctgcctcagccttccgagtagctgggattaccggcgggtgccaccacgcctggctaattttttgtatttttagtagagacaagatttcaccgtgttcgccaggatggtctcgatctcctgacctcatgatccgcctgcctcagcctcccaaagtgctgggattacaggtgtgagccaccacgcccggcttgagttgcttcttaatatccatccttcatttcacctgtctgtgtccttatttatagggctcttgttccctatataacagaattgaaaattccctttaaaaaaatacagcaaatgcacacagaggatcagaggatggaggggagaatttgatgagataaccagggaagtatttagtacaaagcctggcacagagtccatgtgcagtacatgttaattattgtgattatctaaggaaaaataaagagacacagagaaaagcaaaaaggttgccttaggccaggtgcggtggctcacacctgtaatcccagcactttgggaggccgaggcaggcagatcacctgaagtcatgagttcgagaccagcctggccaacatggtgaaaccttgtctctacaaaaaaaaaaagacaaaaattagctgggcatggtggcacgcgcctgtaatcccagctactcaggaggctgagacacaaggatcacttgaacccaggaggcggaggtggcagcgagccgagatcacaccactgcactccagcctgggtgacagggcgacactctgtctcaaaaaaaaaaaaataaaggccaggtgcggtggctcacgcctgtaatcccagaactttgggaggccgaggcaggcagatcacctgaggtgaggggttcgagaccagcctggcaaacatgatttagtagaaaccccgtctctactaaaaatacaaaaattagctgggcgtggtggcaggcacctgtaatcccagctactcgggaggctcaggcaggagaatcgcttgaacccgggaggcggaggttgcagtgagccgagatcacaccattgtacgctagcctggggggacaagagcgagacttcgtctcaaaaataaataaataaataaacaaataggctgggcgcagtggctcacgcctgtaatcccaacactttgggaggccaggcgggcggatcacgaggtcaggagatcgagaccatcctggctaacacggtgaaaccctgtctctactaaaaatacaaaatattagccagcatggtggcagacgcctgtagtcccagctactcgggaggctgaggcaggagaatggcgtgaacccgggaggcggagcttgcagtgagccgagatcgcgccactgcactctagcctgggcaacagagcgagactccatctcaaaagtaaaataaaatataataaaataaaataaataaaatacaaacactcccttagtccagggcagggaccagatacagagataccactctaaaggcagacattggtgttggggtttggtgagttggatggcgagtgaacagatggctagtgggaagggaaagagaagaggaaagggttctccatccagtacctggtccccaagttaatgagtggaggatcccagcctgccccaccaggagggaatacatttgcataaggtccctcatctgcatggcatcccagggaatttgcatagagatggcagcctggggccacatcagtatgacccctcctcccaagggttgaaactccagcctacattacaaaggcctagggcaataggaaagtgggaggggtgaacctcaggatctggggctccaggaagtaaagagaagttggtagtaaactacccttgctctttaaccttctgtggttcccagagcatgagccgcccttcagctggcattctggaccttctaagatactgaccctcacatcccctgctcccgctgtcaccaccctcctacctggaatgcccttccccatatcccgtgctgtgacaaagcttgcctattcttcaaagcctggacatcctgaagaattctgaaagctttcaccaccagcccctccttgccctgcccttggaaatttacaaagctctgtgcatctcccagacatgtacagattttttggggtatatagtttattagtaaggttatatttgattgcaaatgactatatatatatatatatatatatatatatatatatatatatatacacacacacacacacacacacacacacacacacatagtctcatacatatatatatatatatagtctatacatatatatatagtctcatatatatatatatgtataccaggagtcatgtctcatgcttgtaatcccagcagtttgggaggccaaggcaggaaaattgcttgagcctaggagttcaagaccagcctgagcaacctagtgagagcctgtctctacaaaaaagtcaaaagatgagtctggcaggccgagcacggtggctcacgactgtaatcccagcactttgggaggcagaggagggcagaccactttaggtcaggagttcaagaccagcctggtaatattgtgaaaccccgtctctaataaaactgcgaacatagccaggcgtcgtggcccaaacctgtagtcccagctacttgggaggctgaggcaggagaatcacttgaacccagggggcagaggttgcagtgagccaaaatcacaccactgcattccagcctgggcaacagactgacactccgtatcagaaaaaaaaaaaaaaaaaaaaagattggccgggtgcggtggctcacgcctgtaatcccagcactttgggagtccgaggcgggcagatcacaaggtcaggagattgagaccatcctggctaacaaggtgaaaccccatctctactaaaaatacaagaaattagctgggcatggtggcgggcgcctgtagtcccagctactcgggaggctgaggcaggagaacggcgtgaacccaggaggcagagcttgcagtgagccaagatcgctccactgcactccagcctgggcaacagagcaagactccgtttcaaaaaaaaaaaaaaagattattctggcacagtggcgaatgcctatagtcccagccacttgggaggctgaagtgggaggattgcttgagcctgagaggtggaagcttcaatgagccatgattgtaccactgcactccagtctggccaacagagcatgaccctgtctcagaataagagccgggtatggtggctcacgtttgtgattccagcactctgggaggccgaggcaggcaaattgcttgagcccaagagttcaagaccagcctcggcaacaacccaaaaacccatctctacaaaaaaatagaaaaattagccaagcatagtggcacatgcctgtagtcccagctactcgggaagttgacatggaaggatcccgagccagggaggtcatggctgcagtgagccatggtaatgtcaccacactccagcctgagcgacagagtgagaccctgtcttaattaaaaaaaaaaaaaaaagactgaggggaggaagtggttaggggagctgctgctgctgctaaaagaaaggaaaggttgccaggcaggtaaaatacttggcatcagctccatagctccgtcaggaagcctttgcccctacctatgcccctaccttctagtggttatggctcttcagtgaagtgccacctctgggactccttgacactaaaagtcaactccccaggcgggcgtggaacccacccagtcatttgtcaccaaacttggtgctcagcctcatgcttgtgacccaagggtgtgaaactccagcctacacctctggggcatttttttctttctttttttttttttccttttttttttggcagagccttgctgtcacccaggctggagtgcagtggcacaatcttggctcactgcaacctccacctcccgggttcaagcgattctccggcttcagtctcccaagtagctgggattataggcacccgccaccacatcctgctaatttttgtattttcagtagagacagggtttcaccacgtaggccaagctggtctcaaactcctgacctcaggtgatccatctgtctcggcctcccaaagtactgggattacaggcttgagccaccatggccagcctcctggggctttcttcctgggctcatccctgctcacaaagaacagccaggagagagctaagcccactcattcgtaggccaggagaaaggaggtgctagaggccttcctagaagaagacttcctggggactggttcttttgttcaatggataaacgggggtcccaggattttgcaaagcaagttagtagcaaggctggcactaaaacccagaggtcctggtccacaaacctggcctcagattggggagagaaggtcagagagatctaaagcacatttattgccaggcgcgatggctcacacctgtaatcccagcactttgggaggctgaggtgagaggatcacttgagggcaggagttcaagaccagcctgggcaacaaagcgagaatcaaattctacaaaacatttaaaaatgcaccgagcagccgggcacagtggctcacgcctgtaatcccagcactttgggaggccgaggcaggtggagcacgaggtcaggagatcgagaccatcctggctaagaccatgaaacctcgtctctactaaaaatacaaaaaatcagctgggcgtggtggcaggcacctgtagtcccagctactcgagaggctgaggcaggagaatggcatgaacctgggaggcggagcttgcactgagccaagatcgcgccactgcactccagcctgggcgacagagcagagactgtctcaaaaaaaaaaaatgcaccgagcatagtggcacatgcctgtagtcccagctactcaggaggctgaggcagaggatcccttgggctgggaagtttgaggttagagggagccaagatctgcactccaacctgggcgacaaagcacaaccctgcctcaaaattaaatacataaataaattaagcacatttatttattttactgttttattttattattatatatattttaagagacggggctctaccatgttgccaggcgtgtcttgaacccctaaattcaagtgatctgccagccttggcctcccaaagtgctgggattgcagacatgagccactgcgcaaggcctatttgtgtatttatttattttagagacaaaatctctctgtctcccaggctggagtgcagtggctcaatcacagctcactgcagcctcaacctccctgggctcaggtgatcctcccacctcggcctcccgagtagctgtagctgctatgcatttattatgtgtgcgcctatttgtccagccatcctcacacccagtttgtgccaagcctgagacacaagctatctggagctcacatggcatggaggttaaaagcacagactggccgggtgcagtagctcacccctgtaatcccagcactttgggaggctaatgcaggcagatcacaaggtcaggagttcgagaccagcctgaccaacatggtgaaagcccgtcactactaaaaatacaaaaattagccgggcgtggtggtgcgtgcctgtaatcccagctactcaggaggctgaggcaggagaatcactcaaacctggggggcggaggttgcagcgagccgagattgattgcgccactgcactccagccttggcaacagagccagactccgtctcaaaaacaaaaagagcacagaccatccgggcccaaaagaagcacccggcctgctatgtgtctttgctgggtggcttggggcaaacaaccaccctgtgcctcagtttacttttcagtgaaatggggatcaccatggtgtccccttcatgggatccctgtgaggaactaactaagagaaataaggtgcttagaagagtcagctctggctctgccattttgtttatttttatttatttttaatttctattttattttatgtttttcagactgagtctcactctgttgcccaggctggagtgcagtggtgcgatctcggctcactgcaacctccaactcccgggttcaagcgattctcctgcctcagcctcccaagtagagacagggtttcaccatgtcggccaggctggtctcgaactcctgaactcaagtgatccacccgcctcagcctcccaaagtgctgggattacaggcgtcagccagggcgccccgccctggctctgccattttgtaactcagtgagtcacttcatctctctgcttcagtttccctatcgcccatggcgctgcatggcttacatgagataatattcgcagtgcacttagatcagtgcctggcacacggtaagtgctgactacatgtattaacagtatcgtaagtgccgggcgcggtggctcacacctgcaatcccagcattttgggaggctgaagcgggtggatcaggaggtcaggagtttgagaccagcctgaccaacatggtgaaaccccgtctctactaaaaatacaaaaattagccgggcgtggtggcgcgcgcctgtaatcccagctactcaggaggctgactcaggagaatcgcttgaacccaggaggcagaggttgcagtgagccgagatcgcgccactgccctccagcctgggcgacagagcgagactccgtctcaaagaaaaaaaaaaaaaaaggatcataactaagactcgaatgcggagggataacagcctctgctacttgaaacctagtccttctggggaggaaagcccaggtgtgtggcaggtggaagggagggcgagcctaggtggtcctcttgctagggcaagaagcccccaagcacctgcccccagctgagcagctccgcgcctcctggccctggacgaacttgggcccagactggcgctccgtggcaccccctcccccggcctcccgcttcgcgccctcatcccgccccccggcgcggcctcaccagctccccctgggcagcccaaagaatgcgaagaggtaggtgggggtagggaggagggcgagccgctgggagagacaaagggcccgagtctgagcgagagacacaaagacgcgaggaggctggggagataggggaagtgggacaaggacgcggggagtgaccaggtccggaggccggactggagcccagccccacccagcccggccgggccagcgcagcgcgggggccggtctctgctgccccctggcgggtggctgcggtgagaaggcggcgcggagcaggtgttgggaggggaggaccagggcgcgcagggaggtagggagggaaggaagcagagaacagagcagggacagagagacagcgagagagactcgcacgcagagacaagagacgccgagagggagacacagagaaagagacagggacagagagacacagatagagacagagagagacacacggagagacagagacagagaagcacagagatagagaggcacagagatagagacagagaaacacagagacagagaggcacacagagacagagaggcacagagacaggccgatagagacagagatacacagaaatagagacagagacagagaggcacacagatagagacagagagacacagagacagagtcaaaggatggaaagagacatggggaccaagtgacccagaaacagtgacagacaggccgggcttggtggctcacgcctgtaatcccagcatcttgggaggccgagccgggaggatcgcttgaggccagcctcagcaacatagtgagaccccgccgcccccccgccccgtctcttttattgaaataaagaaacagtgactgacaaaggaagaccagaaacagagcgacaccgaagcatgaggacggaaagacccagagaggcagaaatacagggacagagaggaagacccaaagagagtgagagagacacaaagacacgtaagagagacagagaaatccagaaagaaacgagtgcagcgacacctagagttcggggcagagattagaaacgcacgagggtacgagaaacaggctcagggcgatgggctcgacctgcggggaggtcgcacaaccgggacgtgctgggggcagaaccgtaaagccccacgtgcctcaggcaactgtgatgagaggacccgggcaggcaggaaagggcaggattcgaactgtgggtgggacagaggccaggacggactgagctaagagaccgagagaactccggctagggcgaggggcggggctggtggaggcggggctggtgggggcggagtcggccggaagggccgaaaggggcgtggcaagaccttggcgaggcggccggtaggcagggggcggggcgtgggaactactcgggagcagagggggcgtggctagaccttagggggcgtggtttaacgccgggagcgaaggagacagaattctttggcaggggcgaccttagaatcctggggaggagcgagaatggaatcccggggaggaacaggggtggaatccggggggcggggtcagaacgccaggagggggcggggccggagccagggtcggcttgactcgggggagcagcgggtggatcctgtgacgtcagcgggttcgaaccgccggagctgagcgagaggccgggggtgccgagccgggcggggagagctgggccgggagagcagaacagggaggctagagcgcagcgggaaccggcccggagccggagccggagccccacaggcacctactaaaccgcccagccgatcggcccccacagagtggcccgcgggcctccggccgggcccagtcccctcccgggccctccatggcccgggccgctgccctcctgccgtcgagatcgccgccgacgccgctgctgtggccgctgctgctgctgctgctcctggaaaccggtgagacgagcggacggccccctgccctcgcgcggaccccctccaaccttaccttccgagctggggaagccgagcaccttccccgcccacccccggctccccgagccccctctcgcgtgcccccttcctggctggccccacagactccgaccccctacacgtccgattctctcgaggagactctgacccctcctttctgcatctctctcaccaccacccccatccttcttaatccaattgcccatcctacgcctgcttgtctgtccccctccccatttctcggattcccgcgccgaaagggttaaatcccaggaaggcctggtgccccctccccaccccgcgccgagtagttcacccggatctgggtctctgtctcctctacccctctcaggaatgtggggaatgttccccccacctaccgcagtaaggtctcgaggaagaggcgagaccacctccctcccctatttttccttcttcccggcttgggcgtctgaggcccggagagaactgaggacaagcggacctgattcgggtcccttggagggctaaggataagagttctggcgacttagggggaagggcctgagctcggagctccaaccccgaacctcagggagttgggggttctgactccgtggactccagaaaaattaggggccgggggctccgtcttcagggtccctggtagaatggaggctaggcgctaagtctaactgggatctaggtaaaactgggggcgagagaggatcaaacttgtagcttctggatttaattgtgggcagggggcttcgttttcagggttcccggcagaaccgggggacaggagactcgatctcgtgggcttcagacttaattgtaggcagaggaacgtcttctgagatccaaacagaagtgcgagcagcgggccccgtctcttgggctccagatatgatcaagggtcgaaggctctgtcttgaggctggagtctcagtcgcctgagtcccagatagaacgggaggccccgagtcccagaggctgggagactcctccctttccctatgaatggtcgggggcgacggagacgtcgccggggaagttttcctggtttcactctcgccgagccagggaggggcggggcgggcgctcctggctccgggttccggactccccggtttcgggaccttatctatcctctggtagcgcctttgtcctcagagccatagcaggaggtggacgagtggagccgccgcccttatcccccgtccctcccattgctatgccttggaccccctggcgtccttccatccaccccactaggggaggagagcggcccccctggggagggaggggctgggagggaacccttgaaagaggcgctggccccgccccttgcaggtgacccggttgtgtattcccagcgacaaactctgggatgctagagtttcccgagggtttgcgcagaagagagctcagggggatcttgggggaaccccggccacctctctggcctcatttcccccaggatggctctcactggcctcccagctttgacccagagctgggaactccgcttccatcccctgcctctcccttcaggcagaaataggcagatgagatcagaactggcacctctgggtgaattctccgaacccaccagaccctgagcctactgttagcttggtgcatgatctcaccgaaggctccagcttgccctgggaaacaggtcctgtttctgtttccatcttagagatgaggaaacaggctcagcaaaggcaagcagccttctcaaggtctcacagcaggtcccggggaagccgggctccggttcttcagagccccgcaccgggtgggctccaggaagtgcctctgagtttccatttcctccctcgtaaaaaaactgagataacaatcctttccctgcggaccatccggaaggctcccaggccccactgattccctgtgaaacctcttagcccctggagaaggagctgtcggcccctttcttgaccacccccaccccaatccttcgcctctgctgtccactggctggccggctggcatgtgctcgctctccctctctctctctctcccctccccctccctgttttcctccttccctcactttctttccccctcttcatctctcttcgtttctcaccctttctctctccatccctctccaagctctttctctcttctcctctccccatctctctctctcctctccgtctttctctgtatacctgtctagctccactgcctcccccgcttggcctcctcggggaatgcgggtgcaccacctgggcccccagctgggccggctcccctcccccagctttcttccctgcccatccgtgtgtccatgtccgccaggcagccccacgtagtggagggggaggggagcagagggacggcagcctggctgtctcctctcattagggaagggggactgggcagaggagaagttggggggtgggtatatagagaggctggagctacaaggatgggtacagaggccaatagagggaagcggtcagacacagatttaggaatggggtcagagacacgtgtaggaatggaatcagaggatagaaggggagtgaaatgccggcacagggtcgggggagtgaaataccgacacagggatgaggctgaaagacactggaatgggacggaggagggtgggggaagggagctagacatagataccagatgaaggcagggacaggaaaaggaaaggggtttggtgacaggcagggagccccaaagactccagctgtgggacagcagaggtgccgtgacccacggaggtcagggtacagggggcctcaaggccagcgacatgtgggggccacagggagtgatgaacacagaagggacagggagctgggcacatgggccagctcccccgcccctgcctgggacgctgttacatttttaatgtcccagcagtgctgacaaatggagcaggaaggggaggagaagaggggacccagcaagatgggccaggctgtgagaaggtgtgtcagaaatatggggagacagggcactggagacccaggaggcagggagactccacagtcagagacagaaacagagacgtagaccagaaggcttgtgagaagagaaccccaggaatcaaggcagagagccaggttccagacacagggagacccagacggagaaagagaccggagatgtcagacatacagaggaaagaggaagagagtgactaacggggacagggtatcttctcaggctaatgaaaatgttctataattgctcgggtgatggatggctaactctgaatatacaaaagccactgaactgtacactttaaatgggtagattgtatggtatgggaataatgtctcaataaagctgttacaaagagacagagaatataagaggcacagagcagagaccagagactctgggggacacagataagagtgacagaggccaggcacattggctcataccagtaattccagcactttgggaggctgacgcaggagaatcgtttgaaccgagttcaaggctgcagtgagccctgattgcactactgcactccagcctgggccacagagcaagaccctgtctcaaaagagaaaagagtaacagagaccccaagagagaccctgggaattggagacacagagggacagggaccctaagaactagacacagagagagatagaagaggccccggaagacacagataagagacgctaagagacagcagggataccattaaaagactttcaagaagccaggcatggtgactcatgcctataatcctagcattctgggaggtccaggcaggtgtatcacttgagctcaggagttcgagaccagcctgggcaacacggcgaaaccctgtctctgcaaaaaatttaaaaattagccaaaggtggtggtgtgtgcctatagtcccagctacttggaaggctgaagtgggaggatcacatgagccaggaaggttgaggctgcagtgagctgagatcacaccacagtactccaccctgggcaacaaagcaagatcctatctcaaaaaaacaaaacaaaacacacggattagaggaggccagggggcaggtgcagaaatccaggcacagacagacagccctacatcctggctgctgcagccgctgctcactccctgaaccagctcctggatttccgctgtgggggttgggcactgtgattaatacaattaattaactgacaaggtgactgaggcagcagctgaggccagtactcaaagcctctggccttcaagggccttctctagtcccgacgtgccttgccatgggaggctgggtcgctgtgctttatagatctgcgggggaagccaggccctggggagccagccaggcaggagtccaggagcccagctcctcctcccctagacccaggtgtccagcttcaggccccgcctccctcagacccagaagcccaggccccagcctctcctccctcagacccaggagtccaggccccagccctcttccctcagacccaggagtccaggcccccatccctaatccctcagacctgggagttcaggcccccatccctgctctctcagacccaggagtccaggccaccagtgcttcctccctcagacccaggagtccaggcccccatccttcccctctcagacccaggagtccaggcccttagtccctcctccctcagacccaggggtccagcctcagtcccctgctccctcagacccaggagcccaggccccctgctcttcctccctcaaacctgggagtctaggcctccagctcctcctccctcagacccaggaatccaggcccccagccccctcctttctcagacccaggagtccaagcccccaacctctcctccagggttccataggtcactctgcaccctcctcgctgccttggtctacccatccctggatctcggggtctcaagctgtgtctgtccccattgttctcccatgggctcacactacaccctgggcagcctccactctgccaccacaggaagcctgcaggtgcagtccacagggagaggaagtgtgtctggggacccagctcacacttcatgaagctgtcaccagtctggcttgcccagtgacactgagggaggctggtgttcccatggccacagtcccctggctatggtgctggccatgtcctggccaagttcatggcacagcccctgcctagcagtgtgctggatgatgggggctcactccaggctgaccaacctcctggctgtatctcccttgcctccacctgacatgcagagcgtctgggcagcggccctcacccctgtcccctttacctccgcagccctgtcagcctccaagtcccaaccctcccagcttctccctgtcacccccaccgctggtcctgctttcccattccaagttctgagtgtgtttccaatctcgccatcctccgtccccacagccccgaccctgatcccggcgcctccccccgagacccctgccccactgagggctctttcttttttcttttttttctttttttgagacaagagtctcactctgttgcccaagctggcaatagtgtctcactctctcactctgtcttccaagctggtacagtggtgtgatcttggctcactgcaacctccgcctcccaggttcaagcaattcttgtgcctcagcctcccaagtagtggggattacaggcaggtgccaccatgcccagctaatttttgtatttttagtagagacgggctctcaccgtgttgcccaggctggtctcctgagctcaggtgagccactgcacccagcctgtgagggttttttctttctctttttgttttttttgttttttttttgagacatggtagccaccacctgtaatcccagctactcaggaggctgaggcaggagcccgagacagagcaagactccgtctcaaaaaaaaaaaaaaacagaaaagacttgggcttgtttcctgagggctctgtgcagaggagggcgtgttctgcactttctagcaggatccttctagctgtgcataggaacaaaccacaaggacaactgcagtcctccaggtgggaagtggcagtggattagaccagggcagggactggggaggcgtcagaggtggtctaactagataaatgtcaaagaaggaggtgacagggtttcctgatagattgcttatgaggtgagagagaaagaggtgaaaatgccttaaaaatggactgtaggcaggacgcggtggctcacgcctgtaatccaagcactttgggaggccaaggcaagaggatcgctttagttcaggagtttgagaacagcctaggcaacaaacagtgagaccccttctctacaaaaaaaaattttttttaattagtcaagtatggtggtgcccgcctgtagtcccaactactgagaaggctgaggtggtaggattgcttgaacccaagaggttgaggctgcggcaagctgggatcctgcactccaccctgagcaacggagtgagatcctatcccagaaaaaaaaaaaaggaatgttaaccccacagggcctgaactatcctattcattcatttggaattagaaattcagaatggggaacttacagcaatgggattttttttttcagacggagtctccctctgtccccccagctggagtgcagtggcgcgatctcagctcactgcaagctctgcctcccagattcacgccattctcctgcctcagcctcccgagtagctgggactacaggggcctgccaccacgcccagctaatttttatatttttaatagagacgtggtttcaccgtgttagccaggatggtctcaatctcctgacctcgtgatctgcctgccttggcctcccaaagtgctgggtttacaggcgtgagccaccacagctggccctttttttttttgagatggagtctcactctgtcccccaggctggagtgcagtgctgcaatctcagctcactacaacctccgcctgctaggttcaagtgattctcctgcctcagcctcctgaatagctgggattacgggggcccgccaccacgcccggctaatttttgtatttttagtagagacggggtttcaccatgttggccaggctggtctcaaactcctgacctcgtgatccgccctcctcggcctcccaaagtgttggaattacaggcgtgagccattgcgcccagggattttagaacctcattcattcgttattcagcaagtactgagcatctactaggtaccaatctctcttgcagatactgagggtacaggttgtgagcaaaacagacagaagatccctgccctcgtggcgctggcagtcagtttccaggaggatgtgatatatctagtgtgtgagatggtgagaagcactatgcagacagagaacgtaacagggcaaaagggcggaagagcagtcaaccagggaggggagaggaggtggcagctgaggtggagtatctcggggtaaaagaaccccccgaggagtgtgccccacaagaagctaaaagtggtgggtttgtttgagaccgagtcctcactctgtcacccaggctggagtgcagtggcgcaatctcagctcactgcaacctccacctcctgagttcaagcgactctccctaaagtagctggaattacaggcatgcagctaatttttgtatatttagtagagacagggtttcactgtgtcggccaggctggtctcgaactcctggcctcaagtgatccatccaccttggtctcccaaagttctgggattacaggcttgagccaccgccccatcctaaagtcggtttttttgttttaatcctccaaatccagtagtgctcagatgccatcctaaatggaggattggaggggagcctcccttagaaggaagatctgggcccctggaagccacaggactgctccttaagtcaagaactctgaatctggccaggtgcagtggcttatgcctataatcccaacactttgggaggccgaggcgggtggatcacttgaggtcaggagtccgagactagcctggctgacatggcgaaaccccatctctactaaaattacaaaaattagctgggtatggtggtacatgcctgtaatcccagctacttgggaggctgagacaggagaatcacttgagctggggaggcggaggctgtagtgagcccagattgcgccactgcactccagcccgggcaacagagtgagactccacctcaaaaaaaatttttttaaaaagaactctgagttgccgggcgcggtggctcacgcctgtaatcccagcactttgggagtcccaggcgggcggatcacgaggtcaggagatcgagaccatcctggttaacatggtgaaaccccatctctactaaaaaaattagccgggcgtcgtggcgggcacctgtagtcccagctactcgggaggctgaggcaggagaatggggtgaacccgggaggcggaggttgcagtgagccgagatcgcgctgctgcactccagcctgggtgacagagcaagactccgtctcaaaaaaaaaaaaaagaactctgagtcagcctggcgcagtggctcacacctgtaatctcagcactttgggaggccgaggcgggcagatcacgaggtcaggagatcgagaccatcctggctaacacggtgaaaccccgtctctactaaaaatacaaaaaattagcagagcgtggtggcgggcgcctgtagtcccagctactcgggaggctgaggcaggagaatggcatgaacctgggaggcggaggttgcagtgagccgagatagtggcactgcactccagcctgggcgaaagagtgagaatctgtctcaaaaaaaaaagaaaaaaactctgaatcccagagacccagggacttggaggaggtgaagggtgtggggctccagggacctggggctcagcttttcaggtctcctcctccaggaagctcttctttcgttcatcgtccctccctccttcagacaggtcaagcctcttcaggttcctcccataccacccctactccgtcttccaggcattcttggtgataattatttgtgcaatatttgtaccccctgcaatctggatgtcaaccctggaaaacaagcacctgatttgtcctgttacttctgcagcatccacacttagcaacattcattcacttggcagtgtttactgagcacctactacatgctaggccctgttgtaggtgctggggatacagtaggggaaaaacacagacaaacctcagggctggagagggcagaccctctagcacccaggacctgtttgttgagtaactatttgttttttggatttgacctataagatgtgaaagaacagccagattcttccaggttctgccttttcctgatccctccctctctccctactaccaaatcccttccattttaaaattttaaatcctggtggggcacagtggctcacgcctataatcccagcagtttgggaggctaaggtaggcagatcacctgaggtcgggagttcgaggccagcctggccaagatggtgaaaccctgtctctactcaaaatacaaaaattagctgagtgtggtgacatatgcctgtaatcccagctactcgggaggttgaggcagaattgcttgaacccagaggcagaggttgcagggagccaagatggcgccactacactctggcctgggtgatacagcgagaatgtgtttcaaaaaaataaaatcctaagacctattagcctcctccccaacactcagtctcagtcttaacctcttgttcttttcattgccaactttttgtgtcattttgctgtctggtcatctatctctgctcagcccaccaccttcccctcaggcctccttggatgaagttaagtcattctctatttgaagaacccgcaacggctcccacttgccacaaagaggaaactaacttcctcggccccagcctactttgctgtctctgcagttcacacaggcccaaatggctttccttgaccctcattgagtggccttccccccttgcctagctaggaaggggccagagcgcttaaccaccctgatcccaaccttagtgcctttgggggccaggcgggtgataagtcccagcacctggggaatctggaggagccggaagggagtgtgccttgtgggaggggggtgatgtccttcctcagccccacccagctgttgcccccaggagccacatatccggacttctgtctggagctttagacagcaatctccaggccttctgtgtgggctgctacttcccaactgaaataacactctgtgggccaaagcaaacatgcaccacagtcagatctggcctgcagcaggcggctgacccctgctgctctgctcacctgggccacgccccgtgaacatcccccatgagcaagtccttccctggaactggcacaagggaccctggagggtggctgaaacatccccattttacagatggaggaagttgggcttggagacaaggctgccagctggaaagggtgtcagcgttaaataacaagattcagaaaataggattaagtatagagtttattcaagcctaaagcttgaggatggccaccccggagtgtggattcaagttgccccaaataaaccctttgactagctgtgattacaagtggactttttttttttttttttttgagacagggtctcaccctgtcactcagtctggagtgcagtgtgtgatcatggctcactgcagcrtcagtttctcgggctcctggccttgagtgattctcctgccacagcctccctagtagctgggactacaggccctagccatcttgcccagctattttttttttttgagacggagtcttgctctattgcccaggctggagtgtagtggcacaatctctgctcactgcaacctccacctcccgggttcaagcratcctcctgcctcagcccccctagcagctaggattacaggcacctgccaccatgcccgggtaatgtttatttttttagtagagatgggatttcgccatgctggccaggctggtctcgaactcctgacctcaggtgatccacctgctttggcctcccaaagtgctgggattacaggcgtgagccatcgtgccgggtttttgtttttktttttttttttttttaagagatgaagtctcactatattgtccaggctggtctcaaactcctggcctcaagtgatcctccacccacttcggcctcccatagtgctgggattacaggcatgagccaacgcacccagtctgcaagtggatttttaaggaacaaagaagagagagttcctaaattgttaccaagaatttacattgaaacagcataaggtatctgcaggtctggctcagaaaaaaagataacagaaggtattrattggctatgcactgtttattgtatcacaaattccaggaacaagaagctaatggggagggcagctgtgcaggaaccactgcctcgggcatgggtggaggaggcgtgtgaccgaagtcccctattcactgtacagtctccctgggcctgatacatttcgcatagctcagactgatctgagctatttttcttttctcaagttgggtgggggtggcccctctggactggaaaagcctcatttttcccccaagtgacacacctgagtttgtttgacttgtttcccccaagtgacacacctgagtttgtgggacttgtgtggagatgatgtatttatgtcacacttcagtcttcgctgatggcttttttttttatatttatttacattttttcttttaaggtaggcagggccycattctatcgcccatgttggagtgcagtggcgaggtctctgggttcaagtgattccccttcctcagcctcccaagtagctgggaatacaggggcccgccaccacgcccagctaatttttgtatttttggtagagacggggtttcaccatattggccaggctggtctcgaactcctgacctcagggtgatccayccgcctcggcctcccaaagtgctgggattacaggcatgagccgcagcacccagccttttttctttctttcttttctttttgtttcccctcccgagaccgagtctctctctgtcacccaggctggagtgcagtggyatgatctcagcttactgcaacctccacctcccgggttcaagcaattctcccaccttagcctcctgagtagctgggattacaggtgcctgccaccacacccagataatttttctatttttagtagagatggggttttgccatgttggccagtctggtctcaaactcctggccccaagtgagcctcctgcctcggcctcccaaagtgctgggattacaggtgtgagccaccacacctggccttattttatttttaatttctgttcttgtattgctataatttactgatgatttcttacccaaagatcctckgcctgtccccacccaaggggactgccttccaccggggacccctcataagagttactcattaggatggtgttccctggggttcctgtgtgtatgacgccagggcctgtgcaccgcctccatggcccatctccatcagacagagctgggcagtggtgttggccctcgaaatgaggcttgtgccctggcctttcctggcctgggggctgagtgccaaggccacctgtaattaaactgagcttcctatgtttacttagcaagcactgacctctcatttcctggggccctatgctgagtgttccacagctattctttaatctttaaacagcccttgggacgcaggcactattattaacctcacatcacagctggggaaactgaggcacagagaggttaagtgrcctgcacaaggtcgcagagccaggattcaaacccatgaactatgggccactcagtcgccatgctgtactgccgtgcacagcagaggaagatttgttcttgttcttgtttatattaaaagtgagaaaacatgggccacacgcmgtggctcacgcctgtaatcccagcactttgggaggccaaggcgggtggatcacctgaggtcaggagtttgaaaccagcctgaccaacatggtgaactctggtctctactaaaaattcaaaaatcagccggaccgtagtggctcgcacctgtaatcccagctactcaggaggctgaggcaggagaatcgcttgaacccaggaggcagaggttgcagtgagttgagaccgtgccactgcactccaacctgggtgacagagcaagactccgtctccaaaaaaaaaaaaaaaaggtgagaaaccacttaggctggctgagaactgcaaacatgcgtccacataaaaacttgaacttgcatgatcccagcagctttatttatcagagccaaaaagttgaaacaacctcaatgcctatcagcggctgaatggataaacaaaatgtggtccrtccatgtagtggaatattattgagccttaaagaagagtgaagcgycgacacgtgttacagatggatgaacctggaaaacaagatgccaagtgaaagaagccagacacaaaggctacatagtctattacatgaaatgtccagaacaggcacatcaacagagacagaaagttgcatcgtggctgggggaatgggaagtgactgcttaatggataagggggttacttagggaattataaaaatgcccaggctgggcgcagtggctcatgcccgtaatccgaacactttgggaggccgaggcaggtggatcgcttgagctcaggagcctaagcaacatgatgaatccccatctctacaaaaaatacaaaattagctgggtttggtggctcgcacctgtagtctcagctacttggggggctgaggtgggaggatcacttcggccccagagacggtttgcagtgagcagaaatcgcgccattgcacgccagcatggacagagtgagatcctgtctcaaaaaataataccttaaaactgattakagtaacagatgtaaaactccaaatatacttaaagccactgaattgtactgtattttttattttacttttttataaaaaaattatatatatatattgttttttcttttcttttcttttttcaagacagagtctcactttatcacccaagctggagtgcagaggcgcgatctcggctcactgcaacctccgcctcctgggttcaagtgaacacgtccggctaatttttatatttttagtagagacagggtatttcaccgtgttggccaggctggtctcaaactcctgacctcaagtggcccacccacctcggtctcccaaagtgctggaattacaggtgtgagccactgcacccagccttaattgtatactttaaatgggtgaattgtgtagcgtaagaatttatatctcgataaagctgtttaaaaaaaaaaaaaactacgtaaaaaatgagcaaaggacccgaagagacatttttctaaagaagacatacaggcagccaacaaacatgaaaaaatgctcaacatcattaatcatcagagaaatgcaaatttaaaccacaatgaggtgccatctcacctcagtcagaatgtctgttactaaaaagtctaaaaaaacagatgctggcaaggatttggagtaaagggaccgcttacccactgttgatgggaatgtaaattagtacagcctctatggcaaacagcatggagatttctcaaagaactaaaaatagaactaccatttggtccagtattccactgagtatcctcccaaaggaaaagacatcattatatcaaaaagacacctgcgcttgtatgtttattgcagcactatycacaacagcaaagatatggaatcaacttaagtgtccatcgatgaatggaggattggataaagaaaatgtggtctatatctacaaagatttcatgacgaaattgccaaaagcagtgcagcaaaagcaaacattgacaaatgggatctaattaaactaaaragcttctgcacagcaaaagaaactatcctcagrgtgaacagacaacctacagagtgggagaacatttttgcaatctatccatctgacaaaggtctaacatccagaacctacaaggaatttaaacaaatttacaagaaaagaaaaacctaaaaaagtgggcaaaggacacgaacagacacttctcaaaataagacagtcatgcagccaacaaacatgaaaaaaatgctcaacatcactgatcgttgagaaatgcaaatcaaaacaatgagataccatctcacaccagtcaraatggccattatcagaaagtcaagaaacaacagatgcaggcaaggttgtggagaaataggaatgcttttacactgttggtgggaatgtaaattagttgaactattatgaagacagtatggcgattcctcaaagatctagaaccagaaataccatttgacccagcaatcccattacyggtatatacccaaaagaatataaatcattctattacaaagatacatgtatgcgtatgttcattgcaggactattcacaataccaaagacatggactcaatccaaatgcccatcatggatagactggataaagaaaatgtacaggccgggcactgtggctgacgcctgtaatcctagcactttgagaggccgaggcggcggatcacgaggtcaggagatcgagaccatyctgggtaacacggtgaaaccccgtctctactaaaaatacaaaaaaattcrctgtgtgtggtggcgggcacctgtagtcccagctactcgggaggctgaggcaggagaatggtgtgaacccaggaggcrgagcttgcagtgagccgagatggcaccactgcactcmggcctgggcaaaagagtgagactccgtctcaaaaaaaaaaaagaaaagaaaaaagaaacctgcacatgtatcctggaacaataaaaaaaaaaagaaagaaagaaaatgtggtatatgtctaccatggaatactacacagccataaaaaaggatgggatcatgtcttttgcaccaacacrgatggaactggaggccattatcctgagtaaaatagaaagtcaaataccacatgttctcacttataagtggaatctaaacagcagatacacaaagattggaataatggacagtggagactacaaaaggtgggagggagggaaacrggtgagggttgaaaaattaactgttggaggctgggcacagtggcgcacacctataatcccagcactttgggaggccgacacgggtggatcacgaggtcaggcgttcgaggccagcctggccaacatagtgaaaacccatctctattaaaaatattaaaaaattggccgggcgcggtggctcacgcctgtaatcccagcactttgggagcccgaggcrgcagatcacgaggtcaggagattgagaccatcctggctaacatggtgaaaccccgtctctactaaaaatacaaaaaaaaaaaaaaaaaaaattagcygggcatggtagtgtgcgcctgtaatcccagctactcgggaggctgaggcaggagaattgcttgaaattgrgaggtggaggttgcagtgagccgagatcacaccactgcactccggcctgggcaacagtgcgagastctgtctcaaaaaaaagaaaaattgactgttggaagccaggtgcattggtgcatgcctataatcccagcactttgggaggctgaggcgggctgctcactttgagttcaggagtttgagaccagcctgggcaacatggcaaaaccctatctctacaaaaacaaaaattagccgggcactggtggcacatgcctrcagtcccagccactcaagttgcagtgagccaagattgtgccactgcacttcarcctgggagacagagtgagaccctgtctcaaaaaagaaaaagaaaaattaactgttgggtacgctgtttgctattcaggtgatagatatgctaaaagcccagacttcacctctatgcaatataygtatgtaagaaactggcacttgcacctgctaaaaatataataattttaaartttttattttaataaaaaaatagaaacttagggccaaggggggagctgatcatttgaggtcaggagttcgagaccagcctggccaacgtggtgaaagcccatctctactaaaaatacaaaaattagccaggcatggtggcgggcgcctgtaatcccagctactcaggaggctgaggcacaagaatcccttgaaccagggatggaggttgcagtgaccaagattgctccactgcaccccagcctgggcaacagagcgagactcagtctcaaaaaaaaaaaaaagaaacttgagaaaaaatgctatgtaggaggtctgtaggtttcataggaaggtgagagaaagtatattactgaggggggatgaagacaatactcagcctttaaatgttttaaaatgtattttatgaaagtttttttttattgatttattttcagaggatttcccccccccccaaaaaaaaatcttatgaaaattttggggtgggctgggtacagtggctcacgcctataatcccagcactttgagaggctgaggtgggaggatcacttgagtccaggagttcaagaccagcctgggcaacatagcgagacattgtctctaccaaaacaaacaaacaaaaaatacaaattagccaggtgtggtggtrcatgcctgtagtcccagcttgaacctgggaggtcaaggctgcagtgagctgggtggcccactgcactctagcctgggtgaaagtgaggccctgtctgagaaaaaaaaatgtagttgaaagaaaagaaaacttttatttttttattttcttttttaattttaaaggcagggtctcactctgttgcccaggctgttcttgaactcctaggctcaagcattcctcccaccttggcctcccaaagtgctgagattgaagtcttgagccactaccctggccatcatgtcaacttttaaacatacaaatayaggtaagaatggcctggtggccgggcgcggtggctcacgcctgtaatcccagcactttgggaggctgaggcaagcggatcacgaggtcaggagattgagaccatcctggctaacacagtgaaaccccatctctactaaaaatacaaaaaagaaaaaaattagccaggcatggtggcaggcgcctgtagtcccagstactcaggaggctgaggcaggagaatggcgtgaacccrggaggcggagcttgcagtgagccgagatcgcgccactgcactccagcctggtcaacagagcaagactccgtmtcaaaaaaaaaaagaagaatggcctggagcctccctcaccttctccacctagacccacttgacaatgggtgacatattttggtttttgctgaaccatttaggagtaacttgagatcatgacattgcgacttcatatcttctgggaaaaatagtgtgtgcacagccacaatttaattatcacacctcggaacatgaacagcaattccaaaatcatatgtaatatgaactcatagtacaygttatagttgtataatagaatagtcattttagtcttccctaaaatgtcttttccaggtggcttttttggaatcaggatgctgcgaagctgcctacgttgcatgyggagcctgcatttcccgtggggcccccttcgtggtggccctgcctggaggtgtctgggtccctcccccacccgactacttcactctctgtcctctctgcccaggagcccaggatgtgcgagttcaagtgctacccgaggtgcgaggccagctcgggggcaccgtggagctgccgtgccacctgctgccacctgttcctggactgtacatctccctggtgacctggcagcgcccagatgcacctgcgaaccaccagaatgtggccgccttccaccctaagatgggtcccagcttccccagcccgaagcctggcagcgagcggctgtccttcgtctctgccaagcagagcactgggcaagacacagaggcagagctccaggacgccacgctggccctccacgggctcacggtggaggacgagggcaactacacttgcgagtttgccaccttccccaaggggtccgtccgagggatgacctggctcagagtcataggtgagcagggtaagggcgggaggcaaggaggtgggagggccgcggtgtgggagcatccccttgcgggtcagtttctctcttggcttcagctgtgaggttcacattctctgtgggtttccatccatcagcaaatgttcattaagcacctaccgcgtgccagatgcttttctgtgtgctgaggatgtggcaggcaaccaggcattcttgggaaaaacaaaaaaataagtattggctgggcgcagtggcccacccctgtaatcctagcactttggaaggccgagatgggcagatcgcctgaggtcaggagttcaagaccagcctggccaacatggtgaaaccctgtctctacgaaaaataaaaaattagctgggtgtggtggcccgtgcctataatcccagatactcaggaggctgagtcaggagaatcgcttgaacccaggaggcagaggttgcagtgagccgagattgtgccaccactgcactctagtctgggtgacagagcaagactcggtctaaaaaaaaaaaaagtattgaggttgggtgtggtggctcacgactataatccaagcactttgggaggctgaggcaggtagattgcttgagcccatggtggtgcgcagatgtggtcccagctacttgggaggctgaggtgggaggatcgcttgagaccaggaatttgaggctgcggtgagctgtgatcatgccactacactctagcctgggtgacagagtgaggccctatctctaataaataaataaaagagtaagtcaggcagttaaaggggccatggaagttggagagggccaagttgcaattctagctaaggaggtctggggatatttaggcagaaactaggagaggaggagccctctgggtatctaagggaagagcgttccaggcagacggaatggcaagtacaaaggccctgagacaggaatacctggagtatttgagggccaggaaggaagtcagggtggctggagacatatgagtgggggaaagtaggaagcaataaagtcaaggagaggatggggacagattggcaaaagccttgtggactataagaagcctttggcttttgcccagggaggataagagctgtagtaggttcttagcagcagacaggtttgatctggcttgggttctcaccagctcctcctggctgtgttgggaggggaaagaatgggagctgagaaaccacagggtaaggcaactacaaagtccgggtggggccgggtgctgtggctcacgcccataaccccagcactcagggaggccgaggtgggaggatcccttgagcctaggaatttgagaccatcctaggcaacatagtaagactcttgtctcaatgacaaaaaaaattttttttttttttgagacagagttttgctcttgttacccaggctgtagtggagtggcgcgatctcggctcactgcaacctccgcctcccaggttcaaccaattctcctgcctcagcctcccaagtagctgggattacaggctcccaccaccacacctagctaaatttttttgtatttttagtagagacggggttgcaccatgttggccaggctggtcttgaactcccgacctcaggtgatccgtccacctgggcctctcaaagtgctgggattataggcatgagccactgagcctggccaggaaagaaaaaaaaattgttttaattaaccaggctcagtgacttacctgtaatttcagctactcgagagactgaggtgggaggatcacctgagcccaggaggttgaggctgcagtgagctgtgattgtgctactgcactccatcctggacaagagagcgagaccctgtcttaaaacaagtccagtccgggcaggaagtaaaacggcttagaagtaggggacatagtggcctcattgagataggatgtgcagggaaggcgtcttagtcaagtcctggagtctgagaaggagctacctttgggcatagcagaggggcacgggcacagaaacctgggaggtgggcatgagatgggagctgggcgcgttccaggaatggaaagggggctggtgaggataggcaagggcttgggtgaccctcagcggggccacattacacgggcttcacaggtggaggcgaggaggctggactatgccctcagcatggttaagagccatgggaggtgtcaagccacaggagagatctggacaaacgtttgaggttgcaaaaaatgaccggcagcagtatgaggagtgattggaggagtggacggaggtagaagggagctgggacgagaggggagaagaggcattgctgggaagacggatgaggcagtggggggcagagggaagcgggcggcatatagtggtgtttttagaagatagtaggtgctgggcttgcccatggattgagggggaagcaggatcagagaggagtcccaggcctggtgcggtggctcacgcctgtaatcccagcactttaggaggccaaggtgggcagatcgctttgaggtcaggagtttcagaccactctgggcaacatggtgaggccccatctctacaagaaaaaaaaaaattagctgggcatggtagcacacacctgtagtcccagctacccaagaggctgaggtgggaggatcgcttgggcctgggaagcagagattgcaagtgagccaagattgcaccactgcactccagcacgagaccctgtctcaaaaaaaaaaaaaaaaaaataggactcccagcgggaaggtgactgatacttggcaaaaatagagaaggcagggaagattttttttgaaggatgcttttttttcttttcctttttctttttttttttttttctttttttgagacaaagtctcactacattgtccaggctagactcgaactcctgggctcaggggatcctcctacctccgcctcctgcatagctgggattacaggcatgagtcaccacatccagctacgaatgctctttctttaaatcttgaggctgggcgtggtggctcactcctgtaatcccagcactttgggaggccgaggcgggcggatcacgaggtcaggaaatcgagaccatcctggctaacacggtgaaaccccatctctactaaaaatacaagaaattagccaggcgtggtggcgggtgccttagtcccagctactcgggagattgaggcaggagaatggcttgaacccgggaggcggagcttgcagtgagccgagatcgcgccactatactccagcctgggcgacagagtgagactctgtctggaaaaaaaaaaaaatatgttggaagtcccctgggagcccaccttccctaggcaacttcccagaagccacgtcactctggatgccttttcttcccccttctcagcccagagcgtctgagaaggtcaccctgtgctatccttgagtaaacacttccctttccagtaacacatgaaaccacagccgttttccataatacaaaggacagctcttctcctccccaccctcacaaacgcctctcttcttgtgcaatcatttgttctcatccagagataacttcagggctgggcacggtggctcacacctgtaatcccagcactttgggaggctgagaggcaacaagagcaaaactctgtctcaaaataaataaataaataatgagactcagaaaatatgattaagggccaggcgcagtggctcacgcctgtaatcccagcactttgggaggccgaggcaggcggatcacgaggtcaggagattgagaccatcctggctaacacggtgaaaccctgtctctactaaaaatacaaaaaaattagccgggcgtggtggcgggtgcctgtagtcccagctacttgggaggctgaggcaggagaatggcatgaacccaggaggcggagcttgcagtgagccgagatcgcatcactgcactccagcctgggcgacagagcgagactccatctcaaaaaaaaaaaaaaaaagaaaagaaaatatgattaagtgtagggtttaatcaagcccaaagcttgaggatgaccacctgggagcatagattgaagttgccctgaatatacacttcaagcaggggccaaggcaagcagctcttgcaagtgagcttttgtttgtttgtttgtttcttggagagagggtctccaaaactacaaataaaaattagctaggaatggtggcgcacacctgtaatcccagctactcaggaggctaaggcaggcgaattgctgaaaccagcaagggcaggttgcagtaagctgagattgcaccactgcactgcatcctgggtgacagcaagactctgtctcaaattaataaaaaaaaaagagagagagagagataacctcaagagcttccgtatacacactggtgcagaagtaaggaacaaaacagccaaagcctctgtcttcatgatgcgtgagccaccaaggaatagttggccagagtcggcggtcaggaaagtgcccttgacgaagtggggcttggagtggggtctggagaaggaggccaaagcaatccaggcacaaaatcaccaaccaaaaccccaaagtgggtggaggcagagactgaggagggcgtggatggggagcatgtggagtggccaggggaggtggccatggggaagtggtgggctcgggccctgagtcactattctaacagcttggagggcggccaggaggatgtggggaggcttgttggatgctccacgatggtcaggggagaaggcggtgggaagggagagctgggaagaagaggagagtcagaccgtgttgagaagttcagaggtggatacccaggtccagaaagcaacagaagatgtgagtctgggtgggggacacacatcataagcatgagctgctattcttcctggagttttgtttttgtgatttttttccatgttttccaagagaatgaggtggaaagggtataaaaaaaagaaacggctttgagattttctgcctttatcacacttccagtcattcaatcatctaatggtgattacaggaaaaggaacagggggcctttccagctggacctttgaaccacagtactcagttactcgctcggccttgatttgctttttttttttccttttttttttttttcttttggagacagagtctcactgtcacccaggctggagtgcagtggcacgatctcggctcactacaacctctgcctcccaggttcaagcaattctcttacctcagcctcccgagtacctgggattacaggcacctgccaccacgcccagctaatttttgcatttttagtagagatggggtttcaccacgttggccacgctagtctagaactcctgacctcaggtgatctgcccacctgggcctcccaaagtgctgggattacaggcatgagccactgcgcccatcctaatttttgtattttcagtagagatgagttttcaccatgttggccagactggtctcaaattcctggcctcaagtgatccaccctcctcagcctcctaaagtgctggtattgcaggtgtgaaccaccacgcccgaccagcttttttttaaatctcagcctcctctaggcttttggaccctgtctctgcatctctggcagggcgaagagacagtataccgaaatggccaggccaggcgcctgtaacctcagagctttggggagccgaggtgggaagatggcttgtgctcaggagtttgagatcagcctgggcaacatagcaagaactcatctctacaaaaaaatttaaaaattagccgggcatggtggtgcatgcctatggtcctagctactctggaggccaaggcgggaggatcacttgagcctaggaggtgcaggctgcagcaagctatgatcacaccactgcactcgagaccaggtgacagagcgggcccctgtctctaaaaaataaataaagtaaaataaaatgggcaacacttggatagggcagtgcaggccagacattaccctaagccatttacctatcaatgtattatttaattcacacagcaatcctaggggtgggtactttcattatccccattttacaaaacaagaaacagctacagagttgcaaaaccacttatcccaagccaggccgctgataagcagcagagctgggattggaaccccggcagttagggcctaaccaccctgctcctctgctgagtgtttgttgaatgactgccggtgaggagtgacgcaccccctctcctcctctccccagccaagcccaagaaccaagctgaggcccagaaggtcacgttcagccaggaccctacgacagtggccctctgcatctccaaagagggccgcccacctgcccggatctcctggctctcatccctggactgggaagccaaagagactcaggtgtcagggaccctggccggaactgtcactgtcaccagccgcttcaccttggtgccctcgggccgagcagatggtgtcacggtcacctgcaaagtggagcatgagagcttcgaggaaccagccctgatacctgtgaccctctctgtacgctgtgagtgtatcgggggtgacccctcccccatcaaaactgcctacactggcttctctaaagcactgtctacattgtctctgaatgttgtctacgtgggttccctgaagccaaattctgcactaccttcctgccattgtctacactggctcccatgggcaaatctacatacttccccctcattgtctacattggctttactgggttcctgcatgctgtgcctagtctgtggtaacctgggatgggcttgcaagagccagtttgatacatttctttccaattccacatccaatgaagtcttctcggtagcttgaaatcaaccttggggaatatttacaccaaggaaattggcaaaccctagaaatgggggcttcttttattccccagagagttggtttaccagcaaagagctgcccccaacagtgtcttttctggctcccatggaccccggttgacactgcccctggaccgttagatcaatcatgctgggccatgtccacatgtctacatgtctacactgcccaacctaacatcgtctccacaccttcccatacttctgccttgacttccctaggtgccatctatactgagtctcccagagtctctacaccgacccctgatccttgatattatttacattgtatttattatttattatttattattatatttttatatattatatattatataaaatatataaattatatattatatattaacatatattttgtcattatttattattgttatttaatataatataattacattatattatatattacattacaggctccaccccccgggccctgttgatcctgacccctcccactgggttttttgctagctcttccagaaactgcctatactcacacctcgtaatgttacccagagaggccaccctggcactcttcacacagaatccctcaaatactggcttaaccacctcttccaccactgtccaaaatgaccacatatcccaactcaatgttgtctacactagctccccaggcaatgcctccacttacacagattccctaagccaagtctacaccagctcccccaggcaacatgcatcacgtgcgcccataagtgcaacagctcccctgagcctcgtctgtgccactttcctcccgggacctacactggttgcccaaaccctgttttgacatcctccctccatgccaaaaacacacacacaggccgggtgcggtggctcacacctgcaatcccagcactttgggaggccaaggcgggcagatcacttgaggtcaggagttcgggactagcctgggcaacatggtgaaaccctgtctgtactaaaaataccaaaattagctggacgtggtggtacatgcctgtaatcccagccatttgggaggctgaggcggagggatggcttgagcccaggacgtggagtttgcagtaaaccaggatcaccccactgctctccatcctgggcaacagagcaagatcctgtctcaaaaacacacacacacacacacacacattatttgtagtggctcccttaggcactgccagcactgaacaataactcccacaaaattatccacagtggtttccctgaacagtgtctacactgacatcagcacacaacagcctggactgatttgccccagacagttttgactgctgtacctcctgccaacccgccccgtttctttagcattcctgtctatctgctaacttgtccacccgctctgggattctcctccttgctgatccagtccccccatttcccccagaccctcctgaagtgtccatctccggctatgatgacaactggtacctcggccgtactgatgccaccctgagctgtgacgtccgcagcaacccagagcccacgggctatgactggagcacgtgagtcacgtggtctcagaaccctgggtctgagggaggcggggctgggggcctggactcctggatctaagggaggaggggctgggggcctggactcctggatctgagggaggaggggctgggcctaaattcctaagtcctccaggatgaagggagcttgcattttggcaatttggggtctccgggagtacttaggtccctggagcttggctcctggtgggtgtatctttagggatgaggcctgtgctcccctctcgaccttggtatccctctcacctgaccccacacccctccaggacctcaggcaccttcccgacctccgcagtggcccagggctcccagctggtcatccacgcagtggacagtctgttcaataccaccttcgtctgcacagtcaccaatgccgtgggcatgggccgcgctgagcaggtcatctttgtccgaggtgagtgggtcttgggggccgtgtgtggagacctgggtccgctcccctggagttctgcccttcaggacttggggctgcactgggggaggctgcgccgccgacctgggagggatgcagacctgcctggctgaggggagatgagggttggccttcccctcgtggcctcagactggggtctggatttggggtgtcggggtaggtgaaggcagcagagttggggggttgaggactttgctcggggttcctagaaagtagaggcctgggtagggtcctcacgaatagacccgaggaagctgccctgggctccagctcctgagaaagacgcacacctagagtcaggcatgcaaacttcaaagagacagaaaccaagagctcccacccccagaaacacaatccggccccaaggcacggagccaaagaggaaaagcacaaagccagaccatcacccagtgatggaaactgggtcaaactcacaactgcagggccacacacctagagcgcggccgggactgttaacagagccatgcttcctgggacagagagacccctgggtcctggagatagggccagagacccctcctgtcagagccacagctggcaggatccacagccacagacactccctgtgctgagaaattctgttgcagagatgcatcagaatccagacactcacctggatggtaaccctgcacgctcaaacccattgtcaccaagacacacacccaggaggacagtggcaccagccaagatagactgaacgaagccagatgacacctggaaagggacattctttttttttttttttgagatggagtctcgctctgtcgcccaggctgaagtgtagtggcgcaatctcagctcaccgcaacctccgcctcccgggttcaagcaattatcctgcctcagcctcctgagtagctgggactatatgcgctcaccaccaaacccggctaagttttgtatttttagtagagacagggtttcaccatattggtcaggctggtctcgaactgctgacctcaggtgatccacccgcctcggcctcacgaagtgctgggattatatgcatgagccactgcgcctggccagaaaaagacattcttagaaacacgccagggcgacggtccatgcagcacacctgtgcaaacacgcaatgtgcaggccccccagaaacatgactgaaggtgtagggacaaactcccagacaggggctgtccctgtcatgcagacagactagccacggagggacagaagcagacccccttactgagtcataatcttagaatgcacacacacttgcagggacacccgagggaaaacagacacctcttcaggaatccagatacagccagggagataggacacccctacgggaaacactgtcacagacagcaaacccagagagacagctgtcccgctctgggctcgcctggcgcgtgaggatgcacataagtccccggaggaagacgtcacacagacacgctgggggcaaaactaatccaggacagcaacggctgcacacggaggaatgtcatccctcactcacagaccctcagacggaaaatcaaagacatcctgggaggagcttcttcccaggaaccctcccgaaactccccgaaactcctccgaaattatccagaaagtccgttagggagattctcattcaacaaatatgtgtttcctgtttgctaggcactcttgctgaggttgggaatacaatggtgaatgagccacagtccctgccctcagtagcacacccaggggagggtcagctccacccgcccagacagacaccgaactggaaatacacccctaacctctaccccagatacacctgacaagctgatcccctgcccacacacccagcaggtggctccaaggtcagagcctgcagaacacagacgcaatagagaaagactcagcgctgtggaaagacacccccacctacccacgacagtggccacagggccacccccagccaataacaccattacaaagacacgtgccttcagataatgcctgcagaaacgtgcatgctccaagcactctagaaatcccgtctcaagcagtgagtgccccgacagccacagccagaggagacacactcaaagctcctggggtcactctcagagggtctctgagccacgaacccacatccaggcacacacagagtcgtcacagagacacagtatggagtccacagcagcacgaacataggatacgaacgccgcaccacaggacagatctatctttagggagactcagagaactttttatttttaatagagacagggtctcgctatgttggccaggctggtcttgaactcctggcctcaaagcattcctccagctttggcctcccaaagtgctgggattacaggtatgagccagcacactaagcctgattcagagctttgaaccctagacatatgaacagactcagcttcgagttccaaaacaccaatgccacctccagaaacagagacaagcctcccaagataggctcaacctggtccagttagtgaccagcacaggagaaaaatctgtttcactcctcaacccagtgtatagttagagacatatataccaccctaccccctaccaaaaaagattttatcctcctttttttaatgctatttgtgagtcactaagctgatttgacagcccgctgggtcatgaccccctgtttgaaaacaacagaaacagatgtccttcctgggtctcagcccctcctgtgtgtcgaggtgtagaggtggggtcaggtgtgggtgaaccccccacccccgtctgtcccagttatgccttgcatgcagggatgggggaagtggatgtgggtaggttctggttacattgacttctgtccctggcttggggcccaggagccccatccctccctgctcacactgccctcctcagcacttcatggcttcctctctctctccgcctccccactacctcccatcccccatccccacctgctcagcccctgcagggagcactaaggaagtcccactgtcccggtctgtgagaaccccattttacacactggggataagtggcctagagatgaggcagccacggcacttggaataaatgctcccagccactcaagagggcagaattatcaggaatctgtggccctctgcagagagctttgggatcagacagcctcccactgaaacccagctgtcctcccccgagggggtgtggcccccaagctcatagctttgtgaggaccccacagcacattcagggagggctgcgaagtcagatggcaccagggtcctggccagtgaccgggcggccagatctattgcatccaaatagccagcttccactcggctacggcgatcgccagacatgggagtttggtgttgctagatctgatttgtccccctaagagaaacctggatttttaagtgaaatcgcctgatttttgaaaggttggctagcaatttaaattttgcaaaacactaacacctggggaccaccggttggcatccccctccttgtacaaagtggtgctcaggctgtagcgaagggcggaggggcttctgcttccccacccccctcctcctcctcctccattcttctgcccagagtcaccccctcattctggtcactcccgctccctccatccccgcctatcctgcatctcccccaccccctcactccccagagcgatcctcgtgatcttgtgtctccctttctctctctctcacccctccttctctctctcctcagaaacccccagggcctcgccccgagatgtgggcccgctggtgtggggggccgtgggggggacactgctggtgctgctgcttctggctggggggtccttggccttcatcctgctgagggtgaggaggaggaggaagagccctggaggagcaggaggaggagccagtggcgacgggggattctacgatccgaaagctcaggtgttgggaaatggggaccccgtcttctggacaccagtagtccctggtcccatggaaccagatggcaaggatgaggaggaggaggaggaggaagagaaggcagagaaaggcctcatgttgcctccacccccagcactcgaggatgacatggagtcccagctggacggctccctcatctcacggcgggcagtttatgtgtgacctggacacagacagagacagagccaggcccggccctcccgcccccgacctgaccacgccggcctagggttccagactggttggacttgttcgtctggacgacactggagtggaacactgcctcccactttcttgggacttggagggaggtggaacagcacactggacttctcccgtctctagggctgcatggggagcccggggagctgagtagtggggatccagagaggacccccgcccccagagacttggttttggctccagccttcccctggccccgtgacactcaggagttaataaatgccttggaggaaaacatcaggggtgtcttgtaatacatcagaccccctccttgcatgttggggaaagagagggtgggacagggactcctaggtcccagggctgggaagagctgatccacgcccccggggaacgagagcctggcaggggttagactggggaaggctgtggggctcggaccacttggatccttgaaagacgcattggatggccgagaaccgcaaggctcgtgcaactaggattcaggtcactggattggggactcagaggcctggacatttggactcctgggtcccaggacagaggctgcctttctggatggtgtggccagacccatcagaggcaggagttctctggactcctgggccctcgggtggaggtgggggtggggacagcaggggctcagccaggttccctgcgtcctgagagaatgaggccagagggctgtgatccagtggagcctcagacctcaactcccccaggttgctgggggtctcgggaggggagggctgctccccactcccattcttaggggccctgagggcatggggcaggcggggggtgctggggaagtcccacctctggccaccccgactgtggctcccctccttctccatccttgcccccagggatcaccccaggggacttttcagtggctccctgggagtggcggcagctccctccagctcctctcaactggaaaagcaaagacggggggaggggcggcccttggtccttgaactcccaggctcagtaagggacaggtttttacccgcgtcacctctgctctcccaagcctccatgcctcctctgtaacacggggcaggtgtttccatcggcctcacaaggctgtcgtgggacccagtaaggacatgcccgtgatgccctcatgcagcctcattgacctccacagaccccaccaagccctgtgccaggcagtgctggggctgcagctgtggcctgcacagacccagtgccgtcctccggtgtgcacggccataatgaccacaagaatagcagcagtatgtttaggatgaaggtgtgtgtgtggaccgaggggcagtctctctctctcactcccccaccctctgaagccctccagaggatgccaggctgtggaacgggagcagtggagatccaacagtccagcgtcctctggaagcttcctcctcatctggagagtgaggccgatgcatgcgtgacccccacgggcccttccatacttgttacttcctctggttgtttgttgtctgtactcacccacccaccccacccggacaaccggagggcaggggcggggaattgggtccgcctggcacacagtggatccttcagtgccatgctgagtcctccttacacacccagcaaacacctactgtgtgccgaacctcaggcacacagtctagtatggaaattggcaagtaaacgggtaaccactccaaaaactcttccattaggaaagacttgagaaatggaaacgggaggtgctagcaaggaaggagaggcccaggagcaaacaggcttctcgcttctcgaccccttttcctgtcttgccttttttttttttttttttttttttttttttgagacggtgtctagctctgttacccaggctggagtgcagtggtacgatctcggctcactgcaccctccacctcccaagttcaagcaattctcctgtctcagcctcttgagtaacgcacccagcctttttttttttaagaagtggggtggtctccctatattacccagattgggctcaaactcctgggctcaagcgatcgatcctcccacttcagcctccaaaagtgctgggatgacaggtgtgagtcactgtgcctggcccctggctaattttttttttttttttttaagacggagtttcactcttatccaggctggagtgcaatggcgcgatcttggctcacggcaacctccgcttcccaggttcaagcaattctcctgcctcagcctcctgagtagctgggattacaggcgcgcgctagcatgcccagctaacattttgtatttttagtagagacagggtttctccatgttggtcaggctggtctcaaactcccaacctcaggtaatccacctgcctcggcctcccaaagtgctgggattacaggcgtgagccaacgcgcccggctagcccccggctaatttttaaaattttttctagagatgaggtcttgtgctcgttgccctggctggtcttgaacaatccgcccgcctcgccctcccaaagcgctgggattacaggcgtcagtcactgccccaagccctaacccccttcctgataagtggaaggagattctagtccccagaggtgattctggatcccagaattctgtccccgcattctctgtcttctagccgcccctggtcctgtctcctctcctctcatcttcccactctgccccgcctcattctgccccagctacacagtctacttgctgttctttaaaaacaatacaaggcaggccgagcacggcataatcccagaacgttgggaggccgaggcgggaggatcacttgagcccaggagttcaagaccagcctgggcaacatggcaaaaccccatctctacaaaaaaattcaaaaaaaaaaaaaaaaagctgggcctggcggcacatgcctgtagttccagccactccggagggtgaggtgggaggatcgcttgagcccaggagattggggctacagttggtggtgatcatgccactgcactctagcctgggtgacaaagcgagaccgtctcaaaaaaaaccatagagccccacaagcctcctgcagggccgctggctgtttgcgctgcctgcgatacccccagacactctcatgactcatccccggtgtctctttcaggcccttgctcagttgtcaccttacagtaaggtagaggccctcccactaccttcggggaccccactttgcacctcctatcacttccgcactgtatatttttgtatcccccgtgacttactcccatctggcatgtgagctattgtactggtttgcttactgttgttctccctgcccaaccagaatcaaagttccatgaaggtagacactttgtatgttttgttctccactcatctcccatgcggggcacacatcctcgctccttcctcatgctcagcagtttgagttgaatgaaagaatgtcccctgcccatgggagaggacatagacaggcaggcgatgatgtggggtgggatggtcgcttggaataaggagctgtggcttcctcctggagaccccctcacgctgtccctctccttgcagagacccccaacacagcaggcgcaggggccacaggcggcatcatcgggggcatcatcgccgccatcattgctactgctgtggctgccacgggcatccttatctgccggcagcagcggaaggagcagacgctgcagggggcagaggaggacgaagagtaagtgatgggccctgagacggggatgggagaggggtcgaagaactgaggagtatggggtaggggtgagggtgggagaaaattctccataatggctgtgtgaaacagacagacctaaaggaactggggtctaaatggagtagggaggtatgggtttctctctgctataaagtatggcattgaatttaaaaattagctgggggccaggcacagtggcttacacctgccatcccagcacttttggaggctgaggtggggagatcgatcgtttgagcccaggaatttgagcccagtctgggtaacataggaagactacccccatctacaaaaaaaaaaaaaaaaaaaaaaaaatggccacgcagggtggctctgaccgctccgctctgcaaagactcctcggagcccaggatcctactacattttttttttttttttgtgacggagtctcactctgtcaccgaggctggaatacagtgatgcaatctcggctcactgcaagctctgcctcccaggttaaagcaattctcctgcctcagcctccggagtagctgggaatacaggcgcccaccaccatgcccagctaattttttggatttttagtagagacagggtttcactgtgttagccaggatggtctctatctcctgaccttgggatcccccctcctcagactccaaaagtgctgggattacaggcgtgagccaccatggctggccagttgttaataaaagaagaaagggcggttcctaaattgttatggagaatttacattaaaataacgtaagctattgattggctatccattgctctttgtatcacaaattccagaaacctgaagataaagagtaacactggtcaggcagggtgggtcaggcagggtggctcctgcctctaatcccagcactttgttttgtttttgtttttgtttaagatggagtcttggtctgtcgccctggctggagtgccaaggcgccatctcggctcactgcaacctccgcctccctggttcaagcgattctccagcctcagcctctcgagtagctgggattacagatgcgcgccaccacgcccggctaatttttgtatttttagtagagacggagtttcaccatgttggccaggctactcttgaactcctgacctcaagtgatccacccgcctcggcctcccaaagtgctaagatcacaagcatgagccactgcgcccagccaatgccagcactttggaaggccaaggctcttgttgctagtggttcgagaccagactgaacatcaaagtgagacaccatctctaaaaaaataaaacaaacaaaattagccaggcaaagtggtgcacacctgtggtccagctcctcaggaggctggggtgggaggtcacttgagcccaggagctcaagtctgcaatgagctatgatcatgccactgcactctagcccaggtgacagagcaagaccctgtatcttaaaaaataaaagactgggcacggtgcctcacacctgtaatcccagcactttgggaagccaacccaagtagataacttgagctcaggagttcgagaccagcctgggcaacatggcgaaacctgtctacaaaaaaaatacaaaaattacccagacctggtagcccatgcctgtagtcccagctacttgggtgggctgaggtgggggtgggggcatgtggaggctgcagtgagctatgatcacaccactgtactccagtctggccaacagagtgagaccttgtaaaaaaaaaaaaagaaaagaaaaatagctcagagcagtctgaggtatgcgagctatgcaaaatttgtttttttgagacaggatctcactctgtccctcaggctagagttcagtggtataatctgagctcactgcaaccttcgcctcctgagctcaaccaatcttcctaccgcagcctcccaagtaaatgggaccacgtaccaccacacctagctagtttttgtatttttgtagagacagggttttgccatgttgcccaggctggtcttgaactcctgacctcaggtgatccacccacctcagcctcccaaagtgctcggattacaggcgtgagccaccatgcccagcctggaatctgtatttaccacaagctctctaagtttttctgatgcacaggaaggtctgttacaccactgtcttaatcatctagttagttcaaaccaataacttgctgctgatctcctctgtgtgcagctccatgctgtgacccactgtgtccgagacggcctggagctcacaatatggaggaggagacaaaactgtctccagatagtgatggtgtagcatgaccagtgatgggatagggcagttgagcaagctctgagaagccagagggggcatctgacccaggctggatggtcaggtagggcttcctggaagaggggacatctgagctgacagaatgcatcgtaagcacctgtcattactgtatgctttggtctgtgggtgtgtagaatgagggacaggaactttaacctaatttgagggacaggaaggcacttcatttattcattcattcttttcacaaatatttactgaactcctcatagtggattctggagacaccttgctgacgacccagatctttcttttttttcttttcttttcttttctttttttttctttttgaggtggagtttcgctcttttttcccaggctggagtgcaatggcgcgatctcggctcaccacaacctccacctcccgggttcaagcaattctcctgcctcagcctcctgagtagctgggattacaggcatgcgccaccacgcccggctaattttgtatttttagtagggacagggtttctccatgttggtcaggctggtctcacactcctgacctcaggtgatctgcccacctcggcctcccaaagtgctgggattacaggcgtgagccaccacgcctggctgatctttctttcttttttttttttttttttttttaatttgagatggcatctcactctattgcacaggctggagtggagtgatctcatctcactgcaacctctgcctcccgagttcaagcgattcttgtgcctcagcctcctgagtagctgggattacaggcgtgcaccatcatgcccagctaatttttgtattttttggggagatggcatttcaccatgttggccaggctggtctcgaactgctgacctcagatgatccgcccgcctcagcctcccaaagtgctgggattacaggcgtgagccactgcccccagcccaacacagatcttttttccctcccagagctcacagtggggcatggtaattataaataacatttcaagtacaaattcagtaagtgccctgagggggaagtacagctaggtatgtccgtgtaacaggaattcctgatccactggggaaacctgaaggcttccgggaaaaagaggaattcatggaatgaataaaaactcttactccaggcaagaaaagggggcaggggaaagggagacccaggtagagggaacagcatgtgccataaccccggagtcagagggatgcctgggtcttaatctccacttgtcctacctcctaccccacagcctggagggacctccctcctacaagccaccaaccccaaaagcgaagctggaggcacaggagatggtgagcactttccctggagcccaagctatccccacctccacacccaccccagggctgggaggggcctggcagggagaagctggctgggtggtgggggcagttcctgacctccccgcccctctcccactacagccctcccagctcttcactctgggggcctcggagcacagcccactcaagaccccctactttgatgctggcgcctcatgcactgagcaggtaggagctcatgggaagacaaaggtgggttgggggtctgggttgaagggccaggggtcaggcctggcaaaagaggtcaaagactaaaggtcataactcaaggtcaagggtgtgtccccggttggtgcttaatgcattgagatgtgttcaggattccatgggggaggtcaggggtgaaaaggcccaaggtcacaaggttagaatttaaagtcacttgggggctgggcacggtggctcacgcctataatcccagcactttgggaggccaaggcaggaggatcacttggggtcaggagttcgagaccagcctgtgcaacatggtgaaaccccgtctctactcaaaacacaaaaaattagttgggtgtggtggtgcgagcctgtaatcttagctacccggggcgctgaggaggaagaatcgcctgaacccaggaggccgaggttacagtgagctaagatcacaccactgcactccagcctgggcaacagagcaagattccgtctcaaaaaaataaataaaaccaaataaataaaatcacctgggccgggcatggtggctctggtctataatcccagtactttgggaggccaaggtagctggaccccttgagcctaggagctcgagaccagcgtgggcaacatgggctacccagcaacattttgcgtctacaaaaatactgaatttacctggatgtggtggcaaatgcctgtaggctgaggtgggcggattgcttaagcccaggtggttggggctgtgccactacactccagcctgggcatcagggtgagaccctatctcaaaaaaaaaaaaaaagaggaaaagtcattaggtcaatgaaaattgattatctggtcaggcatggtggctcacacctgtaatcccagcactttgggaggctgagacgggcagatcacctgacgtcaggagttccagaccaccctggctaacaaggtgaaaccccttctctactaaaaacaaaaataagccaggcatgggtgacatgctcctgtaatcccagctattcaggaggctgaagcaggagaatcgcttggacccaggaggcagaagttgcaatgagctgagaccacgccactgcactccagcctaggcaacagagcaagactccgtctcaaaaaagaaaaaggccgggtgcggttgctcacgcctgtaatcccagcactttgggaggccaaggcaggtggatcacctgaggtcaggagttccaagaccagcctggccaacatggtgaaaccctgtctctactaaaaattacaaaaattagctgggcgtggtggcgggcgcctgtaatcccagctacttgggaggctgaggcaggagaatcgcttggacccgggaggcagaggttgcagtgagcccagattgcaccattgcacaacagcctgggagacaagagcaaaactccgtctcaacaacaaaaaaaaacagaatgaaagaaaattgattatctacatttgctggatactgtgcctgaagctgggacaagacaaatcaagtcactcccctcagtggtctactggaggtcaggggtcagacactgaggttgcgctcaaggttcaaaggactgtttagagcccaaggttaagtatttgaggtcaagactgaggtgaaaggttcatggggaaagatttgcagagatcgagtgtcaaaagtgagtcccaggattaacagggtgagttgcacgagctgggctttgggttaaggaagggctgaatgaatgtcccagtgcaatatggcctcaggggacaaggagtgaggtggcatcttgttggcatggggagagagcggtcaggattttggggtcaagagcagattggtaatctgtgtcgtgcgtaggaagtgatcttgagttcctgtcctctctctacctccaggaaatgcctcgataccatgagctgcccaccttggaagaacggtcaggacccttgcaccctggagccacaagcctggggtcccccatcccggtgcctccagggccacctgctgtggaagacgtttccctggatctagaggatgaggagggggaggaggaggaagagtatctggacaagatcaaccccatctatgatgctctgtcctatagcagcccctctgattcctaccagggcaaaggctttgtcatgtcccgggccatgtatgtgtgagctgccatgcgcctggcgtctcacatctcacctgttgatcccttagctttcttgccaaggatctagtgccccctgacctctggccaggccactgtcagttaacacatatgcattccatttgtgatgtctaccttggtggctccactatgacccctaacccatgagcccagagaaattcaccgtgataatggaatcctggcaaccttatctcatgaggcaggaggtggggaaggtgcttctgcacaacctctgatcccaaggactcctctcccagactgtgaccttagaccatacctctcaccccccaatgcctcgactcccccaaaatcacaaagaagaccctagacctataatttgtcttcaggtagtaaattcccaataggtctgctggagtgggcgctgagggctccctgctgctcagacctgagccctccaggcagcagggtcccacttaccccctccccaccctgttccccaaaggtgggaaagaggggattccccagcccaaggcagggttttcccagcaccctcctgtaagcagaagtctcagggtccagacccttccctgagcccccacccccaccccaattcctgcctaccaagcaagcagccccagcctagggtcagacagggtgagcctcatacagactgtgccttgatggccccagccttgggagaagaatttactgttaacctggaagactactgaatcattttacccttgcccagtggaataggacctaaacatcccccttccggggaaagtgggtcatctgaattgggggtagcaattgatactgttttgtaaactacatttcctacaaaatatgaatttatactttgaccaggtcttgccttttctgtgggatgtgaaggggatggggtgagacatgaaggggaatgaggaaggagtctaagggcttgagagaatcagtgaactggggtcaagagagttaaagacaaaaacaaagggaccaaagatacaaaataagaattgagagagtaatgagcaaaaatgtatcaatcaaaaacaaaattttttttttttttgaggcggagtctcgctctgtcgcccaggctggagtgcagtggcatgatctcggctcactgcaagctccaccttctgagttaacgccattcctctgcctcagcctcccgagtagctgggactacaggcgcccaccaccacgcccggcttattttttgtatttttagtagagacggggtttcaccgcgttagccaagatggtctcgatctcctgacctcgtgatccacccgtctcggcctcccaaagtgctgggattacaggcgtgagccactgcgcccagccctaaaaacagaatgttgagtaatggaatggggaggggtccagggcatgctgtttaatgaacattcataattgcaacagcagtatgatgaatgggacaaagataaaaatagcaattggccagatgcagtggctcattcctgtaattccagcacttcgggaaactgaggcgggaagctcgactgagtccaggagttaagagaccagcctgggaaacacagtgagaccccgcctctacgaaagttagccgggcgtggtggcacgcacctgtagttcagctactctggaggctgaggtaggaggatcgattgaggccagaagttcaaggctgcagtaagctatgatggcgccactgcactccagcctgagtgacagagtccaaccttgtctttaaaaaaataaaaattaaaaaagcagtaacgaaagtataagaggctcaagtttaatgaataaacggcaagtaaaagtagactaaaggcaaaatcatgaataatgttgtaataggagcccaaggcatgacggataataaacctgaatgaatgggccagaggcagagtgatgaataatggaaaaatagggaccgggggcaagggaggtaacggacaggagttcatggatccaaaacatgatggctaattagagaagggccggaagaacgacgaaagtgagcaggcaggctggagctaaaagtagtctgggcaatgaagctcaaatgaatggggcagaggcatgatgggtaatgggagaggaatgaatgggccaaagatagaagccgcagtgacgcgaggaacaagaggcatgatgggtaacgaaaggggtgggtctaaggcaactgtttcgctaagaggtgatgagggcattgtgggtaacgaggagcagcgcagggttcgcagaacagattagaattctcccgaggcactctgggaagggccagcacttccggttttaggtcggctactccgaaccagaggtggggtgggggcccggctgccgcggtgcctggtgggacgcgaggcctgaccttgctgcctagccgcctctgccgcgcaacccacctttacctgtccttcgaccctggaacgttagccaatgagagtaccaagctgatacgccaccaaggtcgaccccgtacacgctggagccaatcaaaatgctgcaagggtcaaagccgaccaattatcacagcaacctcgccgcggggcggaatcaaaagagggcctcctccaggagagaggcggggcgatgcctcagcgggcgtggcaaaatgctcagcacagaccaatggcgggttagcaccggaacccgcggcgacgcgagccaataggcgcaggcgctgcgagccaatgggaagggtgggaggggcgccgtggctaccctgcgagtgagaaccaatacaaaaggacatttcagggaaagtgggcgggactttatgcacaagtccaatgggaagaccgagtcttgacgctggtgggcgggcctcagggcacactaaaccaatgggctaggtggggcggggcgacggtggtggcggcggcggcagcgggttcggttgcgcgtggcgcacggggtgggagcggagcccaggccgggagcaggcgccgccgccagtgagaaccggggccggagccgggtgcggatttgctggggctgagtcgggggcgcgcgggccctgacctctgccctctgacctctcccctagcaggcgaccatggggaacgtgttggctgccagctcgccgcccgcagggccgccaccgccgcctgcgccggccctcgtggggctgccgccacctccgccctcgccgccgggcttcacgctgccgccgctgggaggcagcctgggcgccggcaccagtacgagtcgaagttcggaacggacccccggggctgcaaccgccagcgcctcaggggccgccgaggatggggcctgcggctgcctgcccaacccgggcacattcgaggagtgccaccggaagtgcaagggtgaggggcgaggggcccccgctgggctgcgatggcctggatctcgggggaagggggaggacactggggactctgggatttggcgcgcaccattggaattatttaacagcactaggaggtgatgttgggatcgaatggtggaacgttggacttggggcttagaatgatggaatcaaatgctggaaacgggatggaatgtcatagcagtagagaaaagcctttagggacctgaggagccccgggatcagccaagccagacttctcttgtgatcgggaaggcaactgaggcccaaggtcacggtgtcagcaaggtgtcagcgaggttccttgggtatgggacccaaagcctccggatcccagcctggagcaattagagtagtagtagtggtggagatttatggagttctgttctggtgttcattatacgttaactcattagatccttgggacaattctgtgtggtgagggtcccatctttcagatgatgagtttgacctaaagttgctcagcttggtggcagtgagatttgagcaagcaaaggccctggccctgtctaactaggctgtactgcctctttacaggtggaatcctttgtgagatgttctgctgtgggtctctggagagagctgggggtggtagggaaggaagagatgagagttggtgtggggttggagtggagtgtgacagcgtttctcttctccagagctgtttcccattcagatggagggtgtcaagctcacagtcaacaaagggttgagtaaccattttcaggtgagccttcctggtgtccttacccaccagagatcgtccccgccgtccccctccctgcatctgcacactcggcccaattactcctccctcaagagctgggctccctgatacttgaaaagactcggagatatagtgccagactgactactcagtttggggacctagaatccagaggtactgtctccccatagcagctaggctggagtgaaggaacaggtctgtgggcctaccggcagcacctcctttctctgagtctcttagtcaggccgtgcctcccagtcttcatcccctgcccagcccagagaccttgtccttgccctcttcagtgggcaagcctatctgtccagtatcgtcacagctctcgctttccttccaggtcaaccacacagtagccctcagcacaatcggggagtccaactaccacttcggggtcacatatgtggggacaaagcagctgagtcccacagaggtgagcttcctttttcatccattcattgtatccttctaataacaaatttgtagccaaatgtcaagctaagacggcctcatcaggaaaaggtcacagctaccgagagcctggagatggggattgcatctctccgaggtgcactgggacacaaataattccttcatccagcaaacatccgccaaacccctgctctctgcctggccccatgctgagcagtgctggggatgtggccacagccaccctgtcaccagacagcgatgacccagggtggaaagggctggactgtagatcatgcagaactttgaatgccagactaggctttggactttctctagggggttgtggagagtcatggcatggtttggtcaagggaaagacgtggtccacaggttcccgctgtagaaatctctggggcatctctggggtggccatgtgggggctagttattaggaagggcaaaactggaggcccagacagggttggggggactgaatgaggtctctgcttctgtcatttcccttcagcaaatgtgtttattctgcaaaccttcattgcacaacacattctgtgcccagccctgtgctggcacacatgactgaaacagcatgggactcacccgtggggcaggggacagactgttcccagagagtaacaagccaggatgggcaaggctgacatgggggaacccaaaggtcggggagcctaactcagcttaggtggtcagagagcacttcgtggaggaggggacccccatccgaggctttctgaccctaggcttctcaccccggcccatctcacatacttgcacagtgcaccacctctgaccccttccgttctctctgcctcacaggcgttccctgtactggtgggtgacatggacaacagtggcagtctcaacgctcaggtcattcaccagctgggccccggtctcaggtccaagatggccatccaggtgagtggggcacggaggctgctgctcccctcggccaccgtgagcagggagccgccctcacaccccctcctctccacagacccagcagtcgaagtttgtgaactggcaggtggacggggagtatcggggctctgacttcacagcagccgtcaccctggggaacccagacgtcctcgtgggttcaggtaagaggcggagggcttggagggtggtcacaaaactgcagttctggctttgccagcaaatccaccccatttgtgaacctccttttctgccactggagaagtggctcagcaggagtgattttgaaacatcaggcaacatactacagtgggtgagacggtcacccactgaccatgagtgggtgagtcagagcagtcttttttttttttttttttgagatggagtcttgctttatcacccaggttggagtgccgtggcacgatcttggctcactgcaacctccatctcctgggttcatgcaattctcctgcctcagcctcccgagtagctgggattacaggcatgcgctaccacgcctggctaatttttgtatttttagtagagacagggtttcaccacattggtcaggctggtcttgaactcctgacctcaagggatccacccacctcagcctcccaaagtgctgggattacaggtgtgagccaccacgcccagccagtcagcgcaattttaactgagattttcttttgtattaaaaaatgttttaagatggggtcttgctgtattggccaggctggtcttggaactcctggcttcaagcaatcctcccaccttgaccttccaaagtgctgggatgacaggcgtgagccacctcgcctggccagggaaacagcttttcagcctgcaagtagtgcagtcgggactcgtgaaaggaacttgagggaggatggtcccctggttgcataaggctttgcagagccttggccttcgctctgagtgagtctggggctttcggaaaccaaggcatagcttctcacaggaccctgcagctggcgtagagagcagactccaaagggggtaccactgggagggagtggacggggagaggaggttggattctggatgttgtttgaaggcagagctgccaggatttgttgagaccggatggaggcgatgactctgtagtttttggctggaactggaaggatggagtttcggattgccagctttgtgtctttgtgcagccatccactgtgtcgtggagagcaggctcttgagcgctgagtcctgagtgaatgactcgtgcaggcggggaggggagctagggttggccttggacccctgggagtgcctagggagagtcaccacttctcgctgcaggagcccagggagactcaaaagtgttgacttttgagctgccagaggaggagaaggggctaccccggctgggggacaggagcaagaagattccaggcagggagaagcaggaacaggggtgagggaagggaagggccatggcagaaaacccaggagacagggaagctggaggtgcagcaggtgcagagaggcctcctaggtgaggctgatctgtaggggccccatgaggaagaaacatttcctgtccccaactcacctggtgacatcaccccatcttctcatacactacagttgaaccacatgagccttttttgttggtttgtttttgtttttgagacggagtcttgctctgttgcccaggctggagtgctgtggtgcaatctcggctcactgcaacctctgcctccctggttcaagcgattctcctgcctcaggctccctagtatccctagtagctgggactacaggcgcgcgccaccatgcctggctaatttttgtatttttagtagagacaggttttcgccatgtcggccaggctgatctcgaacttcttacctcaagtgatccacccgccccggcctcccaaagtgctgggattacaggtgtgagccaccgcgcccggccgaccatgcaagcttttctgacggttcctgaaaccaccgagttggttctaccccaggaccgacgcacactctgtccctgctgcatggaattcttccctctggtcttgacatgactgggaaggcttgcgtgcgcatgtcgccctctgtcgtccaccattgtccccatcttgcaaggccaagaggaggttctccactaagggcacatggccagtgggactccagtgtccctgctcttcacggcgccagcaaccccgttccctgtgccgcctcgctcgcctggtcctttcgtgctccccagcactggcctcctggagcccagggccaccagtgacgctttggtctctagtcctttccagtgcctcttccttcccccagacaccagtgagaacagggcctgccgtgtgccggtcagggctgagctctcgagtctcttgccaccaacagctccgacttgacccagggtgtctctacctccaggcggctctgtgacctccggcaagtggttccagcccttctgggcttcagtctcctcatctgtcacttgggcacaatagaagcaactacctcccagtgaaggagtccatgagagggcccgacttctcggcctcagcactgggccacatgcacagtcaccacttgctccactctggcatctccatggggacaatgcccgcaggcacccccatttcacagataaggaaagcgaggcccaggggtgaaatcagttgcccagggtgacacagccaggaagcagaggagctgggatttgaatggaagcttaattcaggagcccgtgagcctccccagcccctcccaatggtgacagctccttttctgcttcactctgagcacctcatgtgtgcccagccctgggctgggacacagcagtgaccgagacagcccattcctgccctcatgggggtcccaggtcaggcacagtggctcacacctgtaatcccagcactttgggaggctgaggtgggcggatcgcttgagatcgggagttcaagatcagcctgggcaacatagcaataccctgtctctacaaaaaaaattagaaattaggcatatggtggtacatgcctgtagtcccaactactggggacgctgagctggcagggcacatgcctatagtcccagctacttgggagcctgggaagggggagtggttctattctgaagctgaggccaagccatccaaggccttgcaggtgtgctgaggaacccatatcttctcagggcacgagggagccatggcaggttctgggcagggggtcaacagggtcaggtttgtgctttaacatgatccctctgtctgctgtctgtgaggtcacttgaagttggggcatgagactagagaggaggctgtgggtagagaaactgggggggtggcccaggagatgggaaggatggttagaaagatacttgagggtctcatggcctcagttccaacagtccctggaactcagaggccagagattctaagtcactcactctagatggctgcttttccctctgggcttcagtctcccccttgattgaatgaggggataacactgaccagagtggtaatggtagtgattttttttttcttttcttcccctgccccacctcacatacctctgccctgagacgcagtctctgttgcccaggccagagtgcagtggcacagtgtcagctcacctcaacctccaccttctgggttcaagtgattctcctgtctcagcctcccaagtagctgggattacaggcacgcactgccacacccggctaatttttgtatttttgcgtcgtggcacatgcgtgtaatcccaggtactcgggaggctgaggcaggagagtcacttgaacccgggaggcagaggttgcagtgagccgagatgacgcctttgcactccagcctgggcaacaagagcaaaacgccccatctcaaaaaaaaaaaaaaagagagagagagggagagatgggggtctcgccatgttgccccagctggtctcagactcctgggctcaaacaaccctcctgcctcagcctcccaaagtgccaggattacaggcgtgagctactgtgccccgcccgtgtgatggtgattcaacaaccagtggggggttcggggattcatttgcttcatctcctctgggaaggagagtcacacagtcgcttgcccgagcccatggggaccagctgcagcctacttctgatctcagcctccccagaagatgccaccagggcactggccatgaactcacggcctctctcacacccaccaggctcatcttgggggttgccgcctaacactcagcccctctgagagctccacccagccatgcctgcaggtatgaaaggcccctattcctgcagctccagagagctggctccaggctggctccatgctagcaggccagcctgctcccactgtggggcccctagtctgcccctctggtcatcttggtctgggaagcatcttcgcacctgctttgctctgtgctgtctcagcttctctgtgtgccctcagtctcgtggcccccaacctcccttcccttctccacgtgtcttcctctccagggctgcaccctaggagattgctcgatcgtggtggatttctcaactgtgaatcttcagtccctcttcccccttcatttctgtctctgcagatgtgttgtttctttttttttttttcttttttttttttttttgtctttttgagatgaagtcttgcactgtctcccaggctggagtgcagtggcacaatcacaatctcagcttactgcaacttccgcctcccgggttcaagcgattctcctgcctcagcctcctgagtagctgggactacaggtgtgcaccaccacactcagctaatgtttgtatttttagtagagacagggtttcaccatgttggccaggctggtctcgaacctccgacctcagacgatccacccacctcagcctcccaaagtgctggaattacaggtgtgagccaccgtgcccagcctctttttttctttaaaaattttttaggccgggcgcggtggctcatgcttgtaatcccagcactttgggaggccgaggcaggcggatcacgaggtcaggagatcgagaccacggtgaaaccccttctctactaaaaatacaaaaaattagccaggcatggtggcgggctcctgtagtcccagctactcggagaggctgaggcaggagaatggcgtgaacccgggaggtggagcttgcagtgagccgagatagtgccactgcactccagcctgggcgacagagcgagactccatctcaaaaaaaaaaaaaaaaaattaaatttcttattttttgaaacaggatctctgttgcccacgttggagtgcagtggcgtgatcatagctcagtgtaaccttgaccttctgagctcaagtgatcctcctgcctcagcctcccaagtagctgggactataagcatgtgccatcatgcctggctacgtttttaaatttatttatttgttgtttgtttgcttattgggacagattctcactctgtcactcaggctggagtgcagtggcactatcatggctcactgcagcctccacctcctgggcttaagcaatcctcccacgtccacccccttagtacctgggactacaggtgtgcaccacctcacccaactaatttttgtattcgctatgtttcccaagctggtttcgaattcctgggctcaaatgaacccactttggcctcccaaactgctgggattacaacaagcatgagccactgtgcctggccttgatttttttttttttttttatgataatctgtagttagatgaagtttttaaattttttgtagagatggggtctcactatgtcacctaggcttgtctccaactgctgacctcaagctgtcctcttgccccagccctccaaagcattgggattactggcatgagccattgcatctggctttttttttttttttttttttttttttttttttttgagatggggtctcaccatgttgcccgggctggcttcgaatgcctaggctcaagcaatcctcccttctcagcctcccaaatagctgggattacaggcacgtgccaccacgccaggcttgttttctttccctgtccctccctctctatttcccactctcttcctccccaattcttctggccctataaaatcacatttgtggcctgtaccctgctaggctcgaaagacaccaaagtgaatccatctccatcctgaggcttgaaaaggcagcccaaaggtggcagttctcttgttcagcaagcactccctacggtggagggacacaggaacgcagacttggacctcagtgcagcaagtcccagccacagctgagcactcgattcctcacaaccccaagaggcagttaggttcacagagagatgatgccagcgtccatggtcaccagccagcctgtggcagggctgggattcgaacccaggctgtgcatatttacccactctacccaatggcctctcagcagcagagtggctcagagcctgggtttgggaggtgtggaggcttggattctgcccttgacacattttgtgagcatgagtgagtgacttaccctgtaagcttctataagtggtggtgaccccctctgtaagtgggggtggataaatgctgaccacatgggcttgtgtcgaccagatgaggtccttcaggtaatgcagtcatagcagggcctgggacgctgacctcagcggtagggaacccctgggcgatgggttaggagaaaggagcccttgagggaggcctgagagcaagcccaagcctccagccggggtgagcctagagggcttcctggaggtggagtctagcctggcactcagggtgggtggaaactgatcgtcattttgcccacaggaatcctcgtagcccactacctccagagcatcacgccttgcctggccctgggtggagagctggtctaccaccggcggcctggagaggagggcactgtcatgtctctagctgggaaatacacatgtgagcctggcgcctgggtccgagggtggaggggctgggcccctggactcctcctgggtctgagggaggacgggctagggccctggacactcaggtctgagggaggaggcctgggttcccagatgcccaaatccccttggtaatgagaccccgcctccaccccactctctgacagtgaacaactggttggcaacggtaacgttgggccaggcgggcatgcacgcaacatactaccacaaagccagtgaccaggtgagtgggtgcagggactagctggtgctgccaggggctgctgggcctggaagtccaggtggggccacttgctaattctcatgtgttgctccggcccctccagctgcaggtgggtgtggagtttgaggccagcacaaggatgcaggacaccagcgtctccttcgggtaccagctggacctgcccaaggccaacctcctcttcaaaggtaaaggtctcggttcccctacgcgggaaacaggcaggaggtgactcaactctgagtggatgtgtgggccaccacaggtgctggaggacagtgtgctgccaccctgtgggcctccacattaccagggaacacttgttaaaaggtaggtggggccgggtgcggtggctcacgcctgtaatcccagcactttgggaggccaaggcgggccgaggtaaggagattgagaccatcctggctaacacggtgaaactccgtctctactaaaaatacaaaaacaaaattagccgggtgtggttgcgggtgcctatagtcccaactactgaggctgaggcgggaaaatggtatgaacccaggaggcggagcttgcggtgagccgagatcgtgccaccgcactccagcctgggtgacagagcaagactccatctcaaaaaaaaaaaagtaggtggacaaccctctactatgttttatgcttggaaaaaaaaagtaggtagagcagccaggcgtggtgactcacgcctgtaatcccagcattttgggaggccaagccaggtagaatacttgaggccaggagttggagaccagcctggccaacgtggtgaaatcccctctctactaaaagtacaaaaattagccaggtgtggtagcgtgctgcaactgtagtccccgctacttaggaggctgaggcacaagaatcacttgaacctgggaggcggaggttgcagggagttgagactgcaccactgcactccagcctgggtgacagagtgagactccatctccaaaaaaaataaaatgaaataaataaataaatgttaaaaaaaatctggtggagcatctgatgggtgtttgggccaagctggagctttgtccatcccctcttatttttctgcacttgactctcttatttttctgagactggtctccctctgtcgcccaggctagagtgcagcagtgcaactgcggctcactgcagcctccacctcccgggctcaagcagccttcccacctcagcctcctgagtagctaggaccacaggtgtatgccaccaggcccagctaatttttttgatagttttgggagacatgggggtttcaccatgttgcccaggctggtctcgaactcctggactcaagccttggcctcccaaagtgctgggattataggtgtgagccaccacacccagccagggtagaaggcactttggaagcctcgagcctgccccattcatcttacgttagtggaaactgaggcttccagaggtttcaaggtcacaactaaatccagaacctcatctcaggcacactggtcgtagtcccaatgtccagtcttaagtcttcttggatatctgtggctcacagattttgggtgtttgagcctcctgctgagcactgctggggccacagcggtgaccagccctgtcttcacgggactcagtgagaggaacagattcatccgcagagtgggcaggactaggttgggggaacccaggggtctagagggcttttcagagggcaggggtcactgagcggagagcagaggaggagtgagccatttgctccagcgtgaagttgttggtgtgatggggtttcagggtggcaggagcagtgtggttaaaggtctggaagctgtcggcatgtggctggtatccaaggtggccaggaactctgcatggatatggtgggaagctggcacgcctctcacctcagctcttccctgcaggctctgtggatagcaactggatcgtgggtgccacgctggagaagaagctcccacccctgcccctgacactggcccttggggccttcctgaatcaccgcaagaacaagtttcagtgtggctttggcctcaccatcggctgagccctcctggcccccgccttccacgcccttccgattccacctccacctccacctccccctgccacagaggggagacctgagcccccctcccttccctccccccttgggggtcgggggggacattggaaaggagggaccccgccaccccagcagctgaggaggggattctggaactgaatggcgcttcgggattctgagtagcaggggcagcatgcccagtgggcctggggtcccgggagggattccggaattgaggggcacgcaggattctgagcaccaggggcagaggcggccagacaacctcagggaggagtgtcctggcgtccccatcctccaaagggcctgggcccgccccgagggggcagcgagaggagcttccccatccccggtcagtccaccctgccccgtccactttcccatctcctcggtataaatcatgtttataagttatggaagaaccgggacattttacagaaaaaaaacaaaaaacaacaaaaaatatacgtgggaaaaaaaacgatgggaggcctccgttttctcaagtgtgtctggcctgttttgagcatttcatccggagtctggccgccctgaccttcccccagccgcctgcagggggcgccagagggccggagcacggaaagcagcggatccttgatgctgccttaagtccggctcagaggggcgcagcgtggcctggggtcgctatcttcccatccggaacatctgccctgctgggggacactacgggccttcccttgcctgagggtagggtctcaaggtcacttgcccccagcttgacctggccggagtggctatagaggactttgtccctgcagactgcagcagcagagatgacactgtctctgagtgcagagatgggggcagggagctgggagagggttcaagctactggaacagcttcagaacaactagggtactaggaactgctgtgtcagggagaaggggctcaaggactcgcaggcctgggaggaggggcctaggccagccatgggagttgggtcacctgtgtctgaggacttggtgctgtctggattttgccaacctagggctggggtcagctgatgcccaccacgactcccgagcctccaggaactgaaaccctgtctgcccccagggtctggggaaggaggctgctgagtagaaccaaccccaggttaccaaccccacctcagccaccccttgccagccaaagcaaacaggcccggcccggcactgggggttccttctcgaaccaggagttcagcctcccctgacccgcagaatcttctgatcccacccgctccaggagccaggaatgagtcccagtctctcccagttctcactgtgtggttttgccattcgtcttgctgctgaaccacgggtttctcctctgaaacatctgggatttataacagggcttaggaaagtgacagcgtctgagcgttcactgtggcctgtccattgctagccctaacataggaccgctgtgtgccagggctgtcctccatgctcaatacacgttagcttgtcaccaaacatacccgtgccgctgctttcccagtctgatgagcaaaggaacttgatgctcagagaggacaagtcatttgcccaaggtcacacagctggcaactggcagagccaggattcacgccctggcaatttgactccagaatcctaaccttaacccagaagcacggcttcaagcccctggaaaccacaatacctgtggcagccagggggaggtgctggaatctcatttcacatgtggggagggggctcccctgtgctcaaggtcacaaccaaagaggaagctgtgattaaaacccaggtcccatttgcaaagcctcgacttttagcaggtgcatcatactgttcccacccctcccatcccacttctgtccagccgcctagccccactttcttttttttctttttttgagacagtctccctcttgctgaggctggagtgcagtggcgagatctcggctcactgtaacctccgcctcccgggttcaagcgattctcctgcctcagcctcccaagtagctaggattacaggcgcccgccaccacgcctggctaacttttgtatttttagtagagatggggtttcaccatgttggccaggctggtctcaaactcctgaccttaagtgattcgcccactgtggcctcccaaagtgctgggattacaggcgtgagctaccgcccccagcccctcccatcccacttctgtccagccccctagccctactttctttctgggatccaggagtccagatccccagccccctctccagattacattcatccaggcacaggaaaggacagggtcaggaaaggaggactctgggcggcagcctccacattccccttccacgcttggcccccagaatggaggagggtgtctgtattactgggcgaggtgtcctcccttcctggggactgtggggggtggtcaaaagacctctatgccccacctccttcctccctctgccctgctgtgcctggggcagggggagaacagcccacctcgtgactgggggctggcccagcccgccctatccctgggggagggggcgggacagggggagccctataattggacaagtctgggatccttgagtcctactcagccccagcggaggtgaaggacgtccttccccaggagccggtgagaagcgcagtcgggggcacggggatgagctcaggggcctctagaaagagctgggaccctgggaacccctggcctccaggtagtctcaggagagctactcggggtcgggcttggggagaggaggagcgggggtgaggcaagcagcaggggactggacctgggaagggctgggcagcagagacgacccgacccgctagaaggtggggtggggagagcagctggactgggatgtaagccatagcaggactccacgagttgtcactatcatttatcgagcacctactgggtgtccccagtgtcctcagatctccataactggggagccaggggcagcgacacggtagctagccgtcgattggagaactttaaaatgaggactgaattagctcataaatggaacacggcgcttaactgtgaggttggagcttagaatgtgaagggagaatgaggaatgcgagactgggactgagatggaaccggcggtggggagggggtggggggatggaatttgaaccccgggagaggaagatggaattttctatggaggccgacctggggatggggagataagagaagaccaggagggagttaaatagggaatgggttgggggcggcttggtaaatgtgctgggattaggctgttgcagataatgcaacaaggcttggaaggctaacctggggtgaggccgggttggggccgggctgggggtgggaggagtcctcactggcggttgattgacagtttctccttccccagactggccaatcacaggcaggaagatgaaggttctgtgggctgcgttgctggtcacattcctggcaggtatgggggcggggcttgctcggttccccccgctcctccccctctcatcctcacctcaacctcctggccccattcaggcagaccctgggccccctcttctgaggcttctgtgctgcttcctggctctgaacagcgatttgacgctctctgggcctcggtttcccccatccttgagataggagttagaagttgttttgttgttgttgtttgttgttgttgttttgtttttttgagatgaagtctcgctctgtcgcccaggctggagtgcagtggcgggatctcggctcactgcaagctccgcctcccaggtccacgccattctcctgcctcagcctcccaagtagctgggactacaggcacatgccaccacacccgactaacttttttgtattttcagtagagacggggtttcaccatgttggccaggctggtctggaactcctgacctcaggtgatctgcccgtttcgatctcccaaagtgctgggattacaggcgtgagccaccgcacctggctgggagttagaggtttctaatgcattgcaggcagatagtgaataccagacacggggcagctgtgatctttattctccatcacccccacacagccctgcctggggcacacaaggacactcaatacatgcttttccgctgggcgcggtggctcacccctgtaatcccagcactttgggaggccaaggtgggaggatcacttgagcccaggagttcaacaccagcctgggcaacatagtgagaccctgtctctactaaaaatacaaaaattagccaggcatggtgccacacacctgtgctctcagctactcaggaggctgaggcaggaggatcgcttgagcccagaaggtcaaggttgcagtgaaccatgttcaggccgctgcactccagcctgggtgacagagcaagaccctgtttataaatacataatgctttccaagtgattaaaccgactcccccctcaccctgcccaccatggctccaaagaagcatttgtggagcaccttctgtgtgcccctaggtactagatgcctggacggggtcagaaggaccctgacccaccttgaacttgttccacacaggatgccaggccaaggtggagcaagcggtggagacagagccggagcccgagctgcgccagcagaccgagtggcagagcggccagcgctgggaactggcactgggtcgcttttgggattacctgcgctgggtgcagacactgtctgagcaggtgcaggaggagctgctcagctcccaggtcacccaggaactgaggtgagtgtccccatcctggcccttgaccctcctggtgggcggctatacctccccaggtccaggtttcattctgcccctgtcgctaagtcttggggggcctgggtctctgctggttctagcttcctcttcccatttctgactcctggctttagctctctggaattctctctctcagctttgtctctctctcttcccttctgactcagtctctcacactcgtcctggctctgtctctgtccttccctagctcttttatatagagacagagagatggggtctcactgtgttgcccaggctggtcttgaacttctgggctcaagcgatcctcccgcctcggcctcccaaagtgctgggattagaggcatgagccaccttgcccggcctcctagctccttcttcgtctctgcctctgccctctgcatctgctctctgcatctgtctctgtctccttctctcggcctctgccccgttccttctctccctcttgggtctctctggctcatccccatctcgcccgccccatcccagcccttctccccgcctcccactgtgcgacaccctcccgccctctcggccgcagggcgctgatggacgagaccatgaaggagttgaaggcctacaaatcggaactggaggaacaactgaccccggtggcggaggagacgcgggcacggctgtccaaggagctgcaggcggcgcaggcccggctgggcgcggacatggaggacgtgtgcggccgcctggtgcagtaccgcggcgaggtgcaggccatgctcggccagagcaccgaggagctgcgggtgcgcctcgcctcccacctgcgcaagctgcgtaagcggctcctccgcgatgccgatgacctgcagaagcgcctggcagtgtaccaggccggggcccgcgagggcgccgagcgcggcctcagcgccatccgcgagcgcctggggcccctggtggaacagggccgcgtgcgggccgccactgtgggctccctggccggccagccgctacaggagcgggcccaggcctggggcgagcggctgcgcgcgcggatggaggagatgggcagccggacccgcgaccgcctggacgaggtgaaggagcaggtggcggaggtgcgcgccaagctggaggagcaggcccagcagatacgcctgcaggccgaggccttccaggcccgcctcaagagctggttcgagcccctggtggaagacatgcagcgccagtgggccgggctggtggagaaggtgcaggctgccgtgggcaccagcgccgcccctgtgcccagcgacaatcactgaacgccgaagcctgcagccatgcgaccccacgccaccccgtgcctcctgcctccgcgcagcctgcagcgggagaccctgtccccgccccagccgtcctcctggggtggaccctagtttaataaagattcaccaagtttcacgcatctgctggcctccccctgtgatttcctctaagccccagcctcagtttctctttctgcccacatactggccacacaattctcagccccctcctctccatctgtgtctgtgtgtatctttctctctgcccttttttttttttttagacggagtctggctctgtcacccaggctagagtgcagtggcacgatcttggctcactgcaacctctgcctcttgggttcaagcgattctgctgcctcagtagctgggattacaggctcacaccaccacacccggctaatttttgtatttttagtagagacgagctttcaccatgttggccaggcaggtctcaaactcctgaccaagtgatccacccgccggcctcccaaagtgctgagattacaggcctgagccaccatgcccggcctctgcccctctttcttttttagggggcagggaaaggtctcaccctgtcacccgccatcacagctcactgcagcctccacctcctggactcaagtgataagtgatcctcccgcctcagcctttccagtagctgagactacaggcgcataccactaggattaatttgggggggggggtggtgtgtgtggagatggggtctggctttgttggccaggctgatgtggaattcctgggctcaagcgatactcccaccttggcctcctgagtagctgagactactggctagcaccaccacacccagctttttattattatttgtagagacaaggtctcaatatgttgcccaggctagtctcaaacccctgggctcaagagatcctccgccatcggcctcccaaagtgctgggattccaggcatggggctccgagcccggcctgcccaacttaataatacttgttcctcagagttgcaactccaaatgacctgagattggtgcctttattctaagctattttcattttttttctgctgtcattattctcccccttctctcctccagtcttatctgatatctgcctccttcccacccaccctgcaccccatcccacccctctgtctctccctgttctcctcaggagactctggcttcctgttttcctccacttctatcttttatctctccctcctacggtttcttttctttctccccggcctgcttgtttctcccccaacccccttcatctggatttcttcttctgccattcagtttggtttgagctctctgcttctccggttccctctgagctagctgtcccttcacccactgtgaactgggtttccctgcccaaccctcattctctttctttctttctttttttttttttttttttttttttttttttgagacagagtcttgctctgttgcccagcctggagtgcagtggtgcaatcttggttcactgcaacctccacttcccagattcaagcaattctcctgcctcagcctccagagtagctgggattacaggcgtgtcccaccacacccgactaatttttgtatttttggtagagacaaggcttcggcattgttggccaggcaggtctcgaactcctgacctcaagtaatctgcctgcctcaccctcccaaagtgctgggattacaggcatgagccacctcacccggaccatccctcattctccatcctttcctccagttgtgatgtctacccctcatgtttcccaacaagcctactgggtgctgaatccaggctgggaagagaagggagcggctcttctgtcggagtctgcaccaggcccatgctgagacgagagctggcgctcagagaggggaagcttggatggaagcccaggagccgccggcactctcttctcctcccaccccctcagttctcagagacggggaggagggttcccaccaacgggggacaggctgagacttgagcttgtatctcctgggccagctgcaacatctgcttgtccctctgcccatcttggctcctgcacaccctgaacttggtgctttccctggcactgctctgatcacccacgtggaggcagcacccctcccctggagatgactcaccagggctgagtgaggaggggaagggtcagtgtgctcacaggcagggggcctggtctgctgggcctgctgctgattcaccgtatgtccaggagctggagcagcaccctctcagagcctcagtttccccagatgtcaatgagagaatcagcatcagccacatctcccacctgaagaatcgaaccttgagttctcacctttaagaatttttttttttttttgagacagtgccttgctcagtcgaccacgctggagtgcagtagcacgatcatcaatcactgcagcctccaactcaagcaaccctcctgcctcaacctcctgagtagctggggccacaggcacccaccaccatgcctggctaattctttcttttttgagatggagtctcactctgtcgcccaggctggagtgcagtggcaccatcttggctcaccgcaacctctgccccccgggttcaagcaattctcctgcctcagcctcctgagtagctagaattacaggcgcacaccaccacaccaggctaatttttgtatttttagtagaaacgaggtttcaccacggtggtcaggttggtctcaaactcctgacatcaggtgatccacccgcctcggcctcccaaagcactgggattacaggagtgagccaccatgcctggccatattttaaacttttttgtagagatggggtcttactatgttgcccaggctgatctcaaactcttgggctcaagcagatcctcctgccaaagcttcccaaagtagttggattacaggtgtgagccaccacgccccaccaacctatgaagatgtctaagcagacagggtgccctatctcaccacatccccagtcagatccagaggtgggacaaggatgggaaggaggttccagaacaaaggctggcagggagtcgtatgggacaggagctgacccagcaaccatccacagagacatcctggagcctgggaaggagaaggacaaagagcccccttttttaaattttttttatgtttttgagacggagtctcactctgtcacccaagctggagtgcagtggcacaatcttggctcactgcaacctccacctcatgggttcaaacgactctcctgcctcagcctcctgagtagctgggaccacaggtgcacaccaccatgcctggataatttttgaatttttggtagagacggagtttcaccatgttggccaggcaggtctcgaactcctgacctcaagtgctccgcccaccttggcctcccaaagttctgggaatacaggcgtgagccactgcaaccagccagtagcccccatctttgcccctcgctgagccctactggatgttcttggttatgcgacagtttccccatctattaaagagaaacccctatagcagaggggaggatgaggttggaaaagcaggagcattgttatgctattcttgtggggtctgggaagcagacatctgggtggatgtttggggggtgctgggcttagttggggaagtaggggggcccctggggctgacagggactggaagctctgagctggccagagggatgttgcaatcctgccagggtcttgtctatgctgtccttttcacaaccatccccctactgccaggctgacacgtggttgcgggggcacaaggccagccaacctagagtctgaggctaggcggaggacaccctccccaccagctgccagggtcactggcggtcaaaggcagctggtggggaaggcattggactccagccttgggggacggatgtagtgatggtgggaagcaggcttggtgccaggaggggcgtcagagggtgaataaaagcagatagagtgtttgggggaggtagccagccaaagggggtgaggcccggtggaagggaagaagggacatacacgcagagctttgcagctgagggttttaattttttgagatggggtctctgtcccaccaggctggagtgcagtggcacaatcacagctcactgcagcctcgaactcctgggctcaagcaatcttcctacctcagcctcttgagtagctgggactacaggcatgcgccaccacgctcggctaatttttgaacttttttgtagagatgaggtctccctatattgcccaggctggtctcgaactcccaggctcaagtgatcctccctcttcagcttcccaaagtgctgggattacaggcatgagccaccatgcctggctaatgcaggtgaggtttttgcagtgtcatccagctaaggcgacccgttcccctcccaaaaaagggagactgagaaccatgaagttaagagcccagagaatatcacggtggtctggggtgcttcaagggctggtctggaataaattggaggtggcacgcagggtaggagcgccgggccaactgggagacccagcaacataaaggaaaagttgttggggctgaggaggcttgctgagagaggggaagtgagggaaagaggtgatctagggacacggtgtgaatgagggggggatgagatcacagggttattactgggagacccctgagggaagatggccacagggacaggacaaggctgtcttcttaagggaggagaccacccctcatattgtcttatgcccaatttctgcctccaaagaaagaaaaagtaaaaactaaaaggcagaaatgaaatccacaagcagacagcccgcgccacaccctgggcctggtggttaaagattgacccctgacctaatccgttaggttatctatagattacagacattgtatagaaaagcactgtgaaaatccctattctgttttgttccgatctaattaccggtgcatgcagcccccagtcacgcatcccctgcttgttcaatcgatcacgaccctctcacgtgcacccacttagagttgtgagcccttaaaaggaacagggattgctcactcggggagctcggctcttgagacaggaatcttgcccattccccgaacgaataaaccccttccttaactcagcgtctgaggaattttgtctgcggctcctcctgctacattctgagtggggaaagggactaaggtggtctgaggaccccacagagtcaggaagattgagaggtgagagtgctgaacggggaggggctttggggctaagggaagtgcccgggaccccacctgaccccaacgctcacgggacaggggcagaggagaaaaacgtgggtggacagagggaggcaggcggtcaggggaaggctcaggaggagggagatcaacatcaacctgccccgccccctccccagcctgataaaggtcctgcgggcaggacaggacctcccaaccaagccctccagcaaggattcaggttggtgctgagtgcctgggagggacacccgcctacactctgcaagaaactcaaaaagggagatgaggggatcgtgggagggaggtagggagggaggagggtgccactgatcccctgaacccctgcctctgcctccagagtgcccctccggcctcgccatgaggctcttcctgtcgctcccggtcctggtggtggttctgtcgatcgtcttggaaggtaaaagtgggatgggagaattgcggagttggagatttggaagagtgaaggtggctacaggcctggggtcccggcttagaggacctctgagagctccggggccccttctgggtcgtggttgcctcatcgtggtcgggtgggtctccaggttctcccaggctcagtcccgcaggcgccaaatctgcgcaggagagcactagcaaccgatgacgtattgaggcccacacctctgggattggctgtcctgcttcgacagccttgaaagtgggtaagctgggtggggggctctgggagaggtcagtgctgagtaaggcaattcccagcagcttgagccccaccaggtcactccagtattcctccccattctttttttttttttttttttttctcttgagacggagtctcgctctgtcgccgaggctggagtgcagtggcgcgatctcggctcactgcaagctccgcctccctggttcacgccattctcctgcctcagcaggactacaggcgcccgccaccgcgcccggctaattttttgtattttcagtagagacagggtttcaccgtggtctcgatctcctgactttgtgatccgcctgcctcgacctcccaaagtgctgggattacaggcgtgagccaccgcgtccggccattcctccccattctaaccacatgatccccaaggatctctatccatcccggtatcccaacctaagggggttccaataacaaatttttggccgggcagggtggctcatgcctgtaatcccagcactttgggaggccgaggcgggcagatcacttgaggtcaggagttcgaaaccagcctggccaacatggtgaaacttcgtctctactaaaaatacaaaaaaattagccaggtgtggaggcacgcgcctgtaggcccagctactcgggaggctgaggcaggagaatcacttgaacccgggaggcggaggttgcagtgagccgagatcataccactgcactccagcctggctgacacagcaagactccgtctcaaaacaaaacaaaacaaaaatagctgggtgtggtggtgcacacctgtaatcccagctacttgggaggctgaggcaggagaactgcttgaacccgggaggtggtggttgcagtaggccgagatcatgccactgcactccagcttgggctacagagcaagactccatctccaaaaaaaaaaaaaaaaaaacaaattttgaacccctgcccatcttcctggcaggcccagccccagcccaggggaccccagacgtctccagtgccttggataagctgaaggagtttggaaacacactggaggacaaggctcgggaactcatcagccgcatcaaacagagtgaactttctgccaagatgcggttagaacccttcccagggcacgggagagctggggtgtgtttttgggtggagccctggcagatggtccaagatgaacagattgaaaaaaaaacaagtcctggagaggctgacaacatccctctggtcacacagctagatctcaaggtgctcagacttcaaggacagtttccctgactcccatccaggccatattttaaaagatggtcttgggctgggcacggtggctcatgcttgcaatcccagcacttagggaggccgaggtgggctgattgcctgaggtcaggagttcgagaccagtctgaccaacatggtgaaaccttgtctctactaaaaatacaaaaaaattaggcaggcatggtggcgtgcacctgtaatcccagctagtcgggaggctgaggcaggggaattgcttgaaccaggaaggtgggagttacagtgagccaacattgtgccagcctgggtgacagaaggagactctgtctcaaaaaaaaaaaaaaaaaaaaaaaaaacaagatggtcttgcccaggtatggtggctcacacctgtaattccagcactatgggaggctgagatgggaggattgcttgagcccaggagttcgagaccagcctgaccaacatggcgagatcctgtctccatttaaaaaaaaaaaaaaaaagatggttttgtgaggtaatgaaaatgaaggccccaagcttggccagacctgggtccccaggctggagtagcaccccttcctgtgtgatcttgacagaggggcattactgtgagcctcagtttcctctcctataaactggtggttctacagggaagtaaaggagcaggcctacagggtgtctggtacatgtagatgctcagtatatcatgaaacccacccttgccccctttggcaagttagagagtcattcgttctttcaaaaatatttactgagcatctgctaagtgctggaaactgtttcaatgtggggaataaaacagtgaagaacgtgccgagcacggtggctcacacctgtaaccccaccactttggaaggccgaggtgggtggatcacttgaggtcaggagtgcgagaaccccgtccctaatagaaatgcaaaaaaaattagctgggcatggtggcccatgcctgtagtcccagctccttgggaggctgaggcgagaggattgcttgagcccaggagatctaggctgcagtgcgccatgtttgtgccactgcattccagcctgggtaacagaatgagaccctgtctcaacaaaaaaagaaaagaaaagagaagaaaagagaaaagaaagacagggagggagggaggaaggaagggagggagggagggaaaatagagccaggcataaacttagaaagatcgtttggaggccaggcacaatggctcacacctgtaatcccagcactttgggaggccaaggcaagcagatcacctgaggtcaggagttcgagaccagcctaacatggagaaaccctgtctctactaaaaatacaaaattagccgggcgtggtggtgcattcctgtagtcctagctactcgggagcctgaggcaggagaatcacttgaacccgggaggcggaggttgcagtgagccgagatcatgccactgcactccagcctgggcgacaaggcgagactccatgccaaaaaagaaaaaaaactcctggcgcggtggctcacgccagtaatcccagcactgtgggaggctgagcaggcggatcacgaggtcaggagttcgagactagcctgctcaacataatgaaaccctctctgtactaaaaatacaaaaattagctgggtgtggtggcaggcacctgtagtcccagctactcgggaggctgaggcaggagaatggcttgaacctgggaggcagaggttgcagtgagccgagacagtgccattgcactccagtccaggtgacagagcgaaactccatctcaaaaaaaaaaggaaggcattggtagcaagagatggcaggccttgaaagccaggccagggtgaagtgtttcttttttttttttttttttttttctttttaaatttttttttttgagacggagtctcgctctgtcacccaggctggattgcagtggcctgatctcggctcactgcaagttccgcctcccgggttcatgccattctcctgcctcaccctcccgagtagctgggactacaggcacctgccaccacgccagctaattttttgtattcttagtagaatgtagaatttacttagtagaattttttgtattcttagccagcatggtctcgatctcctgacctggtgatccacccgcctcggcctcccaaagtgctgggattacaggcgtgagccacggcgcccggccttattttttctttttgagatgtacccagactggagtacagtggtgcgatctcggcttactggaacctccacctcccgggttcaggcaattctcctgcctcagcctcatgagtacttggaactacaggtgtgtgacaccacacatggtattttttgtatttttagtgaagatgacatttcaccatgttgcccaggttggtctcgaactcctgacctcaagtgatcagcctacctcggcctcccaaagtgttgggattacaggcgtgagccaaatgcccagccaagggtaaagtgtttagacttcaacgtgctttggtccatctgggaaactgaggcacagaagttggcccacccagcccagcggtcctcctaatcccacagacagtggggatggagattctgcaaggggaagaggtgggagtcaggtagcaggcagaatttggacagcctgggaggtagctgcacacagtgacccccttccttattcctccccacagggagtggttttcagagacatttcagaaagtgaaggagaaactcaagattgactcatgaggacctgaagggtgacatcccaggaggggcctctgaaatttcccacaccccagcgcctgtgctgaggactccctccatgtggccccaggtgccaccaataaaaatcctacagaaaattctctcctgagtgcttctttactctggggaaggggctgcgggagagggtaggggcttccagagagggcagggtctgcaggagagggcaggggctaaaccttaggtactcctcacaagccctccaatgccctatctacttgccctgtgctgaggatgttttaactccatggtctcaaaagagtcttcctaagaaccctgcaaactgggccttattaatcccataagggcattgaggcccagagaggtgaagttacttgtataaggtcacacagccaggaagtagagaactggaactagattgaaccctcagcctagcaatgtcactatgctacacttttcctagtgtggtctacccgagatgaggggctgaggtttttttttgtttttgtttctgttttgaggcagactcactctctcccccaggatggagtacagtggtgcgatctcagctcactgcaacctccacctcccaggttcaagagattatcctgcctcagcctcccaagtagctgggatttacaggtgtgcgccaccacacccagctaatttttgtatttttagtagagacagggtttcatcatgttggccaggctggtctccaactcctgggcttaagcaatcctcctgccttggcctcccaaagtattagaattacaggcgtgagccactgtgcctggctcttatgtaaaattaaaccacatacacatgagaaacaaccctatgtaattaagatttctttctttttttttttttttttaagagatggagtcacccaggctggagtgcagttgcacaatctccattcactgcagccttgcaacctccaccacctgagttcaagggattctcctgcctcagcctcctgagtagctgggattataggcatgtgccaccacgcccagctaatttttttgtatttttagtagagacggaatttccccatgttggccaggctggtctcaaactcctggccttaaatgatccacccgtcctggcctcccaaagtgctgggattacaggtgtgagccaccgcacccagcttaagatttcataagaaaaatatttgtaagccacatatctaataaccggttaatattcaggctgggtgaagtggctcatgcctgtaatcccagcactttgggaagacaaggcgggcggattacctgaagtcaaaagtttgagacctgcctggccaacatggtgaaaccctgtctctactaaaaatacaaaaaaattagccgggtggggtggcacatgcctgtaatcccagctgcttgggaggctgaggcaagagaatcccttgaacccaggagtcgaaggttgcagtgagccaagatggcgccactgccctccagcctgggagacagagtgggactccatctcaaaaaaaaaaaaaattcaaaatgtataatatacaatcctagttgggacatcaaacactgcagccactgtggaaaacagtatggggtttcctcaaaacattaaagatagaactctcaaatgatccttcaatcccacttctgggtatttattcaaaagaattgaaatcaggaccttgaagagatacctgccctcccatgttcactgcaggtctgctcaatacccaagatatggaaacaacctaaatgtttatcaacagatgaatgggtcaaggaaatgtggtctctacatgtaatggaatgtaacgcatccttaaaaaggaaaccctaaggccgggctctgtggctcacacatgtttttttttttaaattttatttatttatttatttatttatttattttttattgatcattcttgggtgtttctcacagagggggatttggcagggtcataggacaatagtggagggaaggtcagcagataaacaagtgaacaaaggtctctggttttcctaggcagaggaccctgaggccttccgcagtgtttgtgtccctgggtacttgagattagggagtggtgacgactcttaacgagcatgctgccttcaagcatctgtttaacaaagcacatcttgcaccacccttaatccatttaaccctgagtggacacagcacatgtttcagagagcacagggttgggggtaagatcacagatcaacaggatcccaaggcagaagaatttttcttagtatagaacaaaatgaaaagtctcccatgtctacttctttctacacagacacggcaaccatccgatttctcaatcttttccccaacttttcccccctttctattccacaaagccgcgattgtcatcctggccggttctcaatgagctgttgggcacacctcccagacagggtggtggccgggcagaggggctcctcacttcccagtaggggcggccgggcagaggcgcccctcacctcccggacggggtggctgccgggcggagaggctcctcacttctcagacagggcggttgccaggcagagggtctcctcacttctcagacggggtggccgggcagagacgctcctcacctcccagacggggtcgcggccgggcagaggcgctcctcacatcccagacggggcggcggggcagaggcgctccccacatctcagacgatgtgcggccgggaagaggcgctcctcacttcctagatgggatggcggccggacggagacgctcctcacttcccagactgggcagccaggcagaggggctcctcacatcccagacgatgtggctcacgcatgttatcccagcactttcggaggtcaaggcaggaggatcacttgaggccaggagttggagaccatcttggccaacatggtgaaaccccgtctctactaaaaatacaaaaaattagccaggcgtgcgcctgtaatcccagctactcagtaggctgaggcatgagaatcgcttgaacccaggaggtggaggctgcagtgagccgagatcatgccactgcactccagccggggcatcagagcaagactcaatctcaaaacataaaaggaaatcctgaaactgggcacagtggcttatgcgtgtaatcccagcactttggaaggctgaggtgggaggatcacttgaggtcaggagttcgagaccagcctgggtaacatggtgagacaccatctctaccaaaaaaagaagaaagagaataaataaatgtataaatattactccctggggttaatgcatccccttctcccccaaatcaaccctccaaactcctatactctcctgtcttctcactcagcagcctgttagaactcaagtcagattttttgttttttgttttttgagacggagtctcactctattgcccagcctgtgcagtggcaccatctcagctcactgcaacctctgcctcccaggttgaaccgattttcctgctcagtctcccaagtagctgggactacaggcgtgtgtgtgccaccacacccagctaatttttgtatttgtagtagagacggggtttcaccatgttgcccaggttggtctcgaactcctgagctctagcaattagccctccttggcctcccaaagtgctggggttacaggcatgagccaccatggccggcctcaagtcagattatgctcttcctctgctcagaactctcctgattctctcagagtaaacccagaagcacttaccaaggcctacaaacgggacactatgccgtccacgatcgcctcctccctgtctctctctccatcactcacaagcaactctttgctattcctccaatgtactgggcaggttcccatctcagggcccttgcagttactgttcctcttgcctggaatgttcttccccaggggtccagatatctgcctggctccctcctcacttcctccagttctcttccaaaatcatcccctgccagacgtggtggcacacgcctgtaatcctaactctttgagatgccaaggtgggaggattgcttcagctcaggagttcaagatcagcctgggcaatagcaagaccccatccgttctaaaaataaaaataaataaaaaataaaaaataaaaattagctgagcatggtagtggacaccttggggttccagccacgtggcaggctgaggtaggaggatggctttgaatcagggaggttgaggctgcagtgagccatgttctgaattagatactggtgatgatcgtgcaaccttcccaatataggaaaaaccactgaacagtacattttcaaagggtaaatttagccggacacggtggctcatgtctgtaatcccagcacttttggagtccgaggcgggcagatcacctgaggctgggagttcaagaccagcctgaccaacatggagaaaccccgtctctactaaaaatacaaaaaattagccaggtatggtggcgcatgcctgtaatcccagctactccagaggttgaggcaggagaattgcttgaacccgggaggcagaggttgtggtgagccgacatcacaccatcgtactccagcctgggcaacaagagcgaaactccgtctcaaaaaaaaaaaaaataattaagaaattagccaggcgtggtggtgggtgcctgtagtctcagctacttgggaggctgaggcatgagaatcgcttaaacccggcgggtggaggctacagtgagcctagattccaccaccgcactccagcctgggcaactgagtgagactccacctcaaaaaaataaataaaagggtaaattttatggaatgtgaatcataattcaatttttcaacatgcgttaggagggacatttcaaactcttttttaccctagactttcctaccatcacccagagtatccagccaggaggggaggggctagagacaccagaagtttagcagggaggagggcgtagggattcggggaatgaagggatgggattcagactagggccaggacccagggatggagagaaagagatgagagtggtttgggggcttggtgacttagagaacagagctgcaggctcagaggcacacaggagtttctgggctcaccctgcccccttccaacccctcagttcccatcctccagcagctgtttgtgtgctgcctctgaagtccacactgaacaaacttcagcctactcatgtccctaaaatgggcaaacattgcaagcagcaaacagcaaacacacagccctccctgcctgctgaccttggagctggggcagaggtcagagacctctctgggcccatgccacctccaacatccactcgaccccttggaatttcggtggagaggagcagaggttgtcctggcgtggtttaggtagtgtgagagggtccgggttcaaaaccacttgctgggtggggagtcgtcagtaagtggctatgccccgaccccgaagcctgtttccccatctgtacaatggaaatgataaagacgcccatctgatagggtttttgtggcaaataaacatttggtttttttgttttgttttgttttgttttttgagatggaggtttgctctgtcgcccaggctggagtgcagtgacacaatctcatctcaccacaaccttcccctgcctcagcctcccaagtagctgggattacaagcatgtgccaccacacctggctaattttctatttttagtagagacgggtttctccatgttggtcagcctcagcctcccaagtaactgggattacaggcctgtgccaccacacccggctaattttttctatttttgacagggacggggtttcaccatgttggtcaggctggtctagaactcctgacctcaaatgatccacccacctaggcctcccaaagtgcacagattacaggcgtgggccaccgcacctggccaaatttttaatttttttctagagatagggtcttactgtgttgcccaggctggtgtcaaactcctgggctcaagcagatcctcctgcctcagcttcccaaagtggtgggattataggtgtgagccactgcgcccagtcagtagccccctctttgcccctcactgagccctactggatgttcttggttgtgtgacagtttccccatctattaaacagaaacccctatagcagaggggaggatgaggttggaaaatcaggagcattgttattctattcttgtgggatcggggaagcagacatctgggtggatgtttggggaatgctgggctcagttgaggaagtaggggggcccctggggcttacagggactggaagctctgagctggccagagggatgttgcaatcctgccagggtcttgtctatgctgtccctttcacaaccatccccctaccgccaggctgacacgtggttgtgggggcacaaggccagccgaactagagtctgaggctgggctgaggacaccctccccatcagctgccagggtcactggcggtcaaaggcagctggtggggaaggaattggactccagccctgggggacggatgtggtgatggtgggaagcaggcttggtgccaggaggggcatcagagggtgaataagagcagatagagtgtttgggggaggtagccagccaaagggggtgaggcccggtggaagggaagaaggggcatacactcagagctttgcagctgaaggttttaattttttgagatggggtctcactctgtctcaccaggctggagtgcagtggcgcaatcacagctcactgcagcctcgaactcctgggctcaagcaatcttcctacctcagcctcttgaatagctgggactacaggtgtgcgccaccacgctcagctaatttttgaacttttttgtagagatgaggtctccctatattgcccaggctggtctcttaactcctgggctcaagtgatcctccttcctcagcttcccaaagcgctgggattacaggcatgagccaccatgcctggccaatgcaggtgaggtttttagtgtccagctaaggcgaccccttccctttgcaaaaaagggagactgaaaatcatcaagttaagagcccagagaatatcagggtggtctgggatgtttcaagggctggtctgaaagaaattggaggtggcacgcagggcagggttgcggggccaactgggaggccccagcaacataaaggaaaagttgttggggctgaggaggcttgctgagagaggggaagtgagggaaagaggtgatctagggacacggtgtgaatgagggggggatgagatcacagggttattactgggagacccctgagggaagatggccacagggacaggacgaggctgtcctctgagtggggaaaggagctatggtagtctgaggaccccccagagtcagggagattgggaggtgagggtgctgaatggtaaagggcttcggagctaagggaaatggtcaggaccccacctgaccccaacgcccacgggccaggggcagaggagaaaaacctgggtgggcagaaggaggcaatcttccaggggaaggctcaggaggagggagatcaacatcaacctgccccgccccctccccagcctgataaaggtcctgcgggcaggacaggacctcccaaccaagccctccagcaaggattcaggttgttgagtgcttgggagggacacccgcctccactctgcaagaactcataaagggagatgaggggatcgtgggagggagggaggagggtgccactgatcccctgaacccctgcctccgcctccagggtgcccctccggcctcgccatgaggctcttcctgtcgctcccggtcctggtggtggttctgtcgatcgtcttggaaggtaaaagtgggatgggagaattgcggagttggagatttggaagagtgaaggtggctacaggcctggggtcccggcttagaggacctctgagagctctggggccccttcttggtcgtggttgccccattgtggtcgagtgggtctccaggttcgcccaggctcagtccggcaggcgccaaatctgcccaggagagccctagtaaccgatgacgtatggatctccacacctctgggattggctgtcctccttttatagccttgaaagtgggtgatggggcgatgggctgtgggaggaggtcagtgctgagtaaggcaattcccagcggcttgagccccacgcggtcacttcagtatcctccccattctaaccacatgatccccaaggatctccttatctatccccgggatcccaccccaagggggttccaataacaaatttttggtggggcgtggcggctaatgcctgtaatcccagcactttgggaggccgaggcgggcagatcacttgaggtcaggagttcgaaaccagcctggcctacatggtgaaaccccatctctactaaaaatacaaaacagccaggcgttgtggtgcgcgcttggctacttgggaggctgagacaggagaactgcttgaacctaggaggcggaggttgcagtaagccgagatcgcaccatttgacacagcaagtctccgtctcaaaactacaacaacaacaacaacaacaaccaaattttgcacccctgcctcatcttcctggcaggcccagccccagcctagggggctccagaagtctccaacccctttgatggcctggaggagttaggaaagaccctggaggactacactcgggaattcatcaaccgcatcacacagagtgaacttcctgccaagatgtggttagaacccttcccagggcacgggagggctggggtgtgtttgtgtggagccctggaggatgtccaagatgaacagattgaaaaaaaaaacaagtcccagagaggctgacagcatccttctggtcacacagctagatctcaaggatctcagacgtcagggacagtttcccggactcccatccaggccacattttaaaagatggtcttgggctgggcgccgtggctcacacctataatcctaacactttgggaggcctaggcgggcggattgcctgagatcaggagttcaagaccagcctggccaacatggtgaaaccctgtctctactaaaagtacaaaaaattagcctgacatgggggtgtgcacctgtaatcccagctactcgggaggctgaggcaggggaattgcttgcaccagtaaggtgggggttacagtgagccaagattgcaccactgcactccagcctgggcaacaaagcaacattccgtcacaaaagaaaaaaaaaaaagatggttttgcttaggtacggtggctcacacctgtaatcccagcactgtgggaggattgctggagcctaggagtttgagaccagcctggctaacatggcgagatcctgtctctatttttttttttttttttttgagacagagtctcgctctgttgcccaggctggagtgcagtggcgccatctcggctcactgcaacctctgcctccccagttcaagcaattctctgcctcagtctcctgagtagctaggattacaggcgcccaccaccacgcccggctaatttttttgtatttttagtagagatggggtttcaccatcttggccaagctggtcttgaactcctgaccttgtgatccacccgcctcagcctcccaaagtgctgggattacaggtgtgagccaccatgcccggtgatcctgtctctatttaaaaaacaaaacaaaacaaaacaaaacaaaaagcatacaagccagccccggtgcgatagctcatgcctgtaatcccagcactttgggaggctgagtcgggcagattacctgagatcgggggttcgaggccaagttgggcagatcacctgaggttgggagtttgagaccagcctgaccaacatggagaaactccgtctctattaaaaatacaaaattagtcaggcatggtggtgcatgcctctattcccagctacttgggaggctgaggcaggagaatcacttgaacctgggaggcggaggttgcagtgagctgagataatgccattgcactccagcctgggcaataagagcgaatccacgtctcaaaaaaaaaaaaaaaaattgaaaaaaaaaaagatggtcttgtggggtaatgaaggacacaagcttggtgggacctgagtccccaggctggcatagagccccttactccctgtgtgatcttaagagagaggcattactgtgagcctcagtttcctttcctgtgaaatggtggttctgtggggaagtaaagcagaaggcctatagggtgtctggcacattgtaaatgctcagtacatcttcaaatccacacttgctccctttggcaagttagagagtcattcgttcctcaacacatatttattgagcatctgctaagtgctagaaactgtttcaatgtggggaataaaacagtgaagaatatgccgagcgcggtggctcacacctgtaatcccagcactttggaaggctgaggtgagtggatcacttgaggtcaggagtttgagaaccccatctctactagaaatacaaaaaattacccaggcgtgatggcacacacctgtagtcccagctacttcggagacggaggcaagaggatcacttgagcccaggaggttgaggctgcagtgagctatgtttgtgccactgcattccagcctgggtaacagaatgagaccctgtctcatccaaaaaaaaaagaaagaaagaaagaaagaaagaaggaagggagggagggagggagggaaaatctagtcaggcctaaacttagaaagattgtttggaggccaggtgcagtggctcatgcctgtaatcccagcactttggcaggctgaggcgggcagatcacctgaggtcaggagtttgagaccagcctgaccaacaaggagaaaccctgtctcttctaaaaaaaaaatacaaaaaattagccaggcatggtggtgcatgcctgtaatcccagctactcaggatgatgaggcaggagaattgcttgaacctgggagctggaggttgcggtgagctgagatcgcgccattgcactccagcctgggcaacaagggcataactccgtctcaaaaaaagaaagaaagaaagaaagattgattgtttggagggagaggcaaaggtccaaagtcaagaaggtcgatcaataagcaagagcgggtggcatcccaggcaggggaacagcctgggcatacgcagggaggctggaaagtacctttgaatgagtaggggaacagatagggcaagggcaggctggaagaaagagtgggtagcaagagatggcaggccttgaaagccaggccagagtgaagttttcttttcttttcttttcttttgagacggagtcacgctctgttgcctaggctggaacacggtggtgtgatctcagctcattgcactctccacctcccaggttcaagcaattctcctgcctcagcctcctgagtagctgggattacaggcgtgcaccaccacgggtggctaatttttgtaatttagtaaagacggggttttgccatgttggccaggctggtctcgaactcctgacctccagtgatctgcctgcctcggcttcccaaagtgttgggattacaggcgtgagccaaatgcccagccaagggtaaagtgtttagacttcaacgtgctttggtccacctgggaaactgaggcacagaagttggcccacccagcccagcggtcctcctaatcccacagacagtggggatggagattcagcaaggggaagaggtgggagtcaggtagcaggtagaatttgaacagcctgggaggtagctgcacacagtgacccccttccttattcctccccacagggattggttttcagagacatttcggaaagtgaaggagaaactcaagactgactcatgaggacctgaagggtgacatcccaggaggggcctctgaaatttccaacaccccagcgcctgtactgaggacgccctccatgtgtgtccaatgtggtcacacgcccaggtgtgaccaataaaaatcctatggaaaattctctctggccaggcatggtggctgacgcctgtaatcccagcactttgggaggctgaggcgggcggatcacaaggtcaggagattgagcccatcctggctaacacggtgaaaccccgtctctactaaaaatacaaaaaaaatagccaagcgtggtggcaggcgcctgtagtcccagctattcgggaggctgaggcaggagaatcgcttgaaaccgggaggtggagcttgcagtgagctgagatcgtgccactgcactgcagcctgggtgacaagagccagactccgcgtcaaaaaaaaaaaagaaaagaaaattctgtctgactgcttcttcactgtggggcaggggtgccggagagggtaggggctgtgggagagggcaggggctgaaccttacggactcctcacaagccctccaatgccccatctacttgccctgtgctaaggatgttttaactctatggtctcaaaagaatcttcctaagaaccttgcaaactgggacttaataatcccataagggcattgaggcccagagaggtgaggctacttgtataaggtcacacagccaggaagtggagaactggaactagattgaaccctcagccaggcaatgtcactatgctacacttttcctagtgtggtctacccgagatgaggggctgaggttttttgttttgttttgttttgttttgaaacagagtttcgctcctcttgcccaggctggagtacaatggcaccatctcagttcactgcaacctccgcctcccaggttcaagggagtctcctgcctcagcctcccaagtagctgggattgcaggtgcgtgccaccatgcctggttaatttttgtatttttagtagagacgaggtttctccatgttgatcaggctggtcttgaactcctgacttcacatgatctgcctgccatggcctcccaaagtgcagggattacaggcatgagccacctcgcctggcctttttttttttttcttgagacagagtctcactctgtaccccaggctggagtgcaggggcatgatctcggctcactgcaacctccgcctcctgggttcaacagattctcctgccttagcctccctagtatctgggattacaggtgtgtgccaccacacccagctaatttttgtatttttagtagagacagcattttatcgtgctggccagtctggtctccaactcctggattcaagcagtcctcctgccttggcctcccaaagtggtgggattacaggcgtgagccactgtgcccagctcttacgtaaaattaaaccacatgcacatgcaaaacaaccctatgtaaaaaaaaaattttttttgagatggagtctggctctgtcacccaggctgaagtgcaatgatgcgatctccactcactgcaacctctgcctcccaaattcaagtgatttttttgccttagcctcctaagtagctgggattacaggcatgtgccaccacacctggctacttttgttgtatttttagtagagacagagtttcaccatgttggccaggctagtctcgaactcctgacatcaagtgatccgcccgccttggcatcccaaagtgttgggactacaggtgtgagccactgcgcccagcttaagattgcataagaacaatatttgaaagccatatatctaataaggggttaatattcaaaatatataagggactcctacaatgcgagtgggaacaccaaacactgcagccactgtggaaaacagtatggggtttcctcaaaacattaaaaatagaactaccaaatgatcctgcaatctcatttctgggtatttattcaaaagaattgaaatcaggaccttgaagagatacctgccctcccatgttcactgcaggtctgcttaatacccaagatatggaaacaacctaaatgtttatcaacagatgaatgggtcaaggaaatgtggtctatacgtgcaatggaatgtaaagcatccttaaaaaggaaaccctgaggccgggctctgtggctcacacatgttatcccagcactttcggaggtcgaggcaggaggatcacttgaggccaggagttggagaccatcctggccaacatggtgaaaccccgtatctactaaaaatacaaaaaaaatcagccaggcatggtggcgggtgcctgtaaacccagctactcaagaggctgaggcaggagaatcactggaacccaggaggcggaggctgcactgagcagagatcgtgccgttgcactccagcctgggcgacaagaacaaaactccatctcaaaaaataaaaaaaggaactcctgaagccaggctcggtggctcccacctgtaatcccagcactttgggatgccaaggcaggaggatcactcgaggccaggagttggagactatcctgtccaacatggtgaaaccctatctctactaaaaatgcaaacattagccaggcatggtggcgtgtgcctgtaatcccagctacttgggaggctgaggcgtgagaatagcttgaaccaggaggtagagactgcagtgagctgagatcatgccactgcactccagcctgggcgtcagagcaagactccatctcaaaacataaaaggaaatcctgggccgagcgcagtgactcacgcctgtaatcccagcactttgggaggccgaggcaggtggatcacaaggtcaggagatcgagaccatcctggctaacatggtgaaacactgtctctactaaaaatacaaaaaattagctgggcatggtggcgggcgcctatagtcccagctattcgggaggctgaggcaggagaatggcgtgaacccgggaggcagagcttgcagtgagccaatattgcgccatgcattccagcctggatgacagagtgagactgtgtctcaggagaaaaaaaaaaaaaaaaaaggaaatcctgaacctgggcatagtgtcttatgcctgtaatcccagcactttggaaggctgagatgggaggatcagttgaggtcaggagttcaagaccagcctgggtaacatggtgagacaccgtctctaccaaaaaaagaagaaagaaagagaataaataaattataaatattactctctggggttaatgcattcccttctcccccaaaatcaaccctccaaactcctatactctcctttcttctcactcagcagcctgttagaactcaagtcagattttttgtttttttgttttttgaggcggagtctcactctgttgcccaggctggagtacagtggcaccatctcagtccactgcaacctctgcctcccaggttcaagcgattctcctgctcagcctcccaattagctgggactacaggtgtgtgtgtgtcaccacacccagctaatttttgtatttgtagtagagacggggtttcaccatgttgcccaggctggtctcaaactgcccagctctagcgatctaccctcctcggcctcccaaagtgctggggttacaggcatgagccaccgtgcccagcctcaagtcagattatgctcttcctctgctcagaactctcctgattctctcagagcaaacccagaagaacttaccaaaggcctacaaacaggacactacccggttcacgatcgcctcatccctctctctccatcactcacaagcaactccttgctattcctccaatgtactgggcaggttcccacctcagggcccttgcagttactgttcctcttgcctggaatgttcttccccaggggtccagatatctgcctggctccctcctcacttcctccagttctcttccaaaatcatcccctgccagacatagtggcacactcctgtaatcctaacctttgagaggccaagatgggaggattgcttcagctcagaggttcaagaccagcctgggcaacatagcaagaccccatccctcctaaaaaaaattagctgggcatggtggtgcacacttgtggttccagccacttgggaggctgaggtaggaggatggctttgaatcagggaggttgaggctgcagtgagccatgttccaaattagatagtggtgattgtgcaaccttgccaatataggaaaaaccattgaactgtacactttaaaagggtaaatttagcaggacgcggtggctcacgcctgtaatcccagcactttgggagtccgaggcgggcagatcacttgagctcaagagttcgaaaccaacctgaccaacatggtgaaactccatctttacgaaaaattaaaaaattagccaggcgtggtggcaagtgcctgtagtctcagctacttgggacgctgaggcgggagaatttcttgaacctgcggggcagaggctacagtgagctgagattgccccactgcactccagcctgggcaacagagtgagactccatctcaaaaaaaaaaaaaaaaaaaaagaaaaagaaaaaagggtaaattttatggaatgtgaattataactcaatttttcaacatgcattaggagggacatttcaaacccttttttaccccagccttccctgcaatcacccagagtatccagccaggaggggagtggctagagacaccagaagattagcagggaggagggtgcagggtttcgggggatgaggggatgggattcagaccagggtaaggatccaggggtagagagaaagatttgagagtggttttggggcttggtgacttagagaacagagttgcaggctctgtttttgggcccgccctgcccccttccgacctcttagttcctatcctccagcagctgtttgtgtgctgcctctgaagtccaccctgaatgaccttcagcctgttcccgtccctgatatgggcaaacattgcaagcagcaaacagcaaacacatagccctccctgcgtgctgaccttggagctgcggcagaggtcagagacctctcagggcccataccacttccaacatccccttgatctcttggattttggtggagaggggcagaggttgtcctggcctggttaggtagtgtgagagggtcccggttcaaaaccaccacttgctggttgaggagtcgtcagtaagtggctgcgcccccaccctgaggcttgtttctccatctgtacaatggaaatgatgaagatgcccacctgatagggtttttgtggcaaataagtaagtagtttttttgtttttctttttctttttttttttttttttttgagatggagtctcactctgtcaccaggctggagcgcagtggcgtgatctcggctcactgccaactccacctcccgggttcaagcgattctcctgcctcagcctctgagtagctaggactacaggcgcccgccaccacacccagctaatttttgcatttttagtagagatggggtttcaccatgttggccaggatggtctcaatctcttgaccttgtgatccacctgcctcggcctcccaaagtgctgggattacaggcatgagccaccacgcccagctcccccacctttttttttttttgagatggaaagctctgtcacccaggctagagtgcattgagccatcttggctctctgcaacttctgcctcccgggttcaagcaattctcctgcctcaggctcccaagtagctgggattacaggcgcccacaaccatgcctggctaatttttgtatttttagtggagacagagtttcactatattggccaggctgatctcgaactcctgacctcaagtgatctgcctgtgtcagcctcccaaagtgctgtgattacaggcatgagccaccatgccccaccgcaattaagtaaagtaatcatctaaaagccctgccatggttcctgccacacagtgtgtgctggggaagcgcgcacgaattaaacagtagctggcgttgacggggcacctatgcggcattttctgtgcacgatctttactctccctggcaaccctatgaggtagatagtccatgactcccattcatggatgaagaaacaggcccacacaggtaaagcaacttgtaccaggtcataccgctagaaagatgtagagtcagccacgcgcggtggctcatgcctataatcccagcactttcggaggctgaggcgggatgatcacttgaggtcaggggttcgtaaccagcctggccaacatggtgaaaccccgtctctactaaaaatacaaaaattagctgggcgtggtggcggacgcctgtaatcccagctactcaggaggctgaggcagaagaattgcttgaacccgggagacagaggttgcagtgagctgagatcacgtcactgcactccagcctgggtgactgagcaagactccatctcaaaaagaaaaaaaaacaggccaggagcagtggcttacacctgtaatcccagcactttgggaggccaaggcgtgtggattgcctgaggtcaggagttcaagaccagcctggccaacgtggtgaaaccctgtctatactaaaaatgcaaaaattagctgggtgtggtggcaggcgcctgtagtcccagctactcgggaggctcaggtaggagaattgcttgaacccaggagatggaggttgcagtgagccgagatcgcgccactgcactccaacatgggcaatagagcaagactccatctcaaaaaacaaagaagggagggagggaaggaaagaaaggaaaagaagcaacaggtagagtcaggctctgaaccccacaccaatcataacacaacacacagtaggtttgtttttgttttttattttgggcttttgtttgttgtggagacagcgtcacccaggctgtaatgcaatggtacaatcatagctcactgtagccctgaactcctagactcaaacaatcctcccacctcggcctcctgagtagctgggactacaggggcatgccaccacgcctagctaaattttttttttttatttttagtagagatgaggtctccctatgttgcccagattagtgtcttaactcctgggctcaggtgatcctgccaccagggattacaggcacgagccaccatgctggcccttgttttttgttgttttttttttttttttttgagacggagtctcgctttgtcgcccaggctggagtgcagtggcgggatctcggctcactgcaagctccgcctcccgggttcacgccattctcctgcctcagcctcccaagtagctgggactacaggcgcccgccactatgaccggctaatttttttgtatttttagtagagacggggtttcaccgttttagccgggatggtctcgatctcctgacctcgtgatccgcccgcctcggcctcccaaagtgctgggattacaggcgtgagccaccgcgcccggcctgtttttttttttttttttgagactgagtctcgcactgtcgcccaggctggagtgcagtggcgcgatctcggctcactgcaacctccaccttccaggttcaagcaattctcctgcctcagcctcctgagtagctgagattacaggtgcccaccacgatgcccagctaactttttttttttttttggtatttttagtagagacgggggtttcaccatgttggtcaggctggtctcgaactcctgacctcgtgatccgcccgccttggcctcccaaagtgatgggattacaggcgtgagccaccgtgcccagctttttttttttttttttaagagacggggtcttactatgttgcccaggctggactctcaaactcctgggctcaaggaatccttctaccacagctttctgagtagctggggctacaagcccctgccacagtacctggctgtttttgtttttttataattgtggtaaaatataaacaacatggccgggtgtggtggctcacgcctgtaatctcaacactctgggaggttgaggtgggaggattacttgaacccaggagttcaagaccagtctgggcaacttggcaaaactgtgtttctacaaaaaataaaaatattagctgggcagccaggcgcagtggctcatgcctgcaatcccagcactttgggaggctgaggtggatggatcacctgagaggtcaggagtttgagaccaccctggccaacatggtgaaaacctgtctctttaaaaatacaaaaaaatgagccagccatggtggctcacgcctgtaatcccagcactttgagaggccaaggcaggtggatcacctgaggtcaggagttcaagaccaacctggccaacattgtgaaaccccgtctctactaaaaatacaaaaaattagctgggcatggtggcaggcgcttataattccagctactaaggaggctgaggccggagaatcgcttgaacccgggaggcggaggttgcagtgagtcaagatcgcaccattgcactccagcctgggcaacaagagcgaaactatgtctcaaatacatacatacatacaaaaaattagccgggtgtggttgccgcacacctgtaatcccagctacgcgggaggctgaagcaggagaatcgctggaacccgggaggcagaggttgcagtgagccaagatcacaccattgcactctatcctgggtgacggagtgagactctgcctcaaaaaaaaaaaaaaaaaaaaaaaaacttaaccattgcagccatttttaggtgtacagttcagtggcattaagtacattcacactgttgtgcaaccatccccactatttgcaggatgtcttcgtcatcccaaacagaaactctgggtgttttcaatctgctgatgattgctacagaggaattccaggggacatctgttgcgcacctactgtgctcacgctggggcctctgggatggacaggattctgccaaggcagacatctgggtcaagacagtcctgcacagttgttcaggttgtggccaaggttgcgtttgcagatttgccatgtaaaaatacaggatgctcagttacatttgaatttcagattaatagcaaaaaaaactttttggtataattctgaaatatttcatgggacatatttatactaaaacgtcatgcactgttgatttgaaattcaaatgtaattgggcctcctctatttcgtctggcaagcgtagacaaaagaatccagtccaggccaggcgcagtggctcaagcctgtaatcccagcactttgggaggccgaggcgggcggatcacgaggtcaggagatcgagaccatcctggctaacacggtgaaaccccgtctctactaaaaatacaaaaaattagctgggcgtggtggcgggtgcctgtagtcccagctactcgggaggctgaggcaggagaatggcgtgaacctgggaggcggagcttgcagtgagccgagatcgcgccacagcactccagcctgggcgacagagccagactctgtctcaaaaaaaaaaaaaagaatccagtccatagtcccctgagccatgtgccctggggtgcagctgggtccttcaggagaaaaatgctctatttctggcactgggaccgagcctgatgtgggttttttgttggtttttgttgttgttattgtttttgagacaaggtctcgctccaccacacccggctaatttttgtatttttagtagagacggggtttcactacgttggccaggctggtcttgaactcctgacctcaagtgagccgcctgcctcggcctcccaaagtgctgggattacaggtgggagccaccgccctggccctgggcctgatgttgatgacctcctactatgtgcacctgcagctctcctgcataggcctcagccgtcctgcatgaggacactgggaggcaggtgctccctatcaaccccgtgttacagttgaacaaactgagccccagaaaagaaaacgtatttgcccaggtcacacggtgaagaagtgagggattcgaagcccaggtccatctgaagccagagtcacccagaggagaaagagttggaattgagaactcaaggaatgcttggaagtgatcgggctcgagcccacctaggaagaaacagaggctggagacatgagactgtgttgctatttcctctcatcaacccttgggccctattgaggccctaccacaagcctggccctgcagcccagtgactaggagaaattagacacaagataataataacagcaatgatcttttttttttttctgagacggagtcttgctctttcgcccaggctggactgcagtggcgcgatctcggctcaatgcaagctccacctcccaggttcacgccattctcctgcctcagcctcccgagtagctaggactacaggcgcctgccaccacgcctggctaatttttcatatttttagtagagatggggtttcaccgtgttagccaagatggtctcaatctcctgacctcgtgatccgcctgcctcggcctcccaaagtgttggggttacaggcatgagccaccgcgcctggccaacagcaatgatctttgagcacctatattgccagtctccacggtaagagctttcttcattttttgttttgttttgtttcaagacagagtcttgctctgtcacccaggctggagtgcagtggtgtgatcgcggctcactgcagccttcacttcccgggttcaagccattctcctgcctcagcctcccaagtagctgggattacaggcacgcatcactacttctggctaatttttgtatttttagtagggacagggtttttcaccatgttggccaggttggtctcaaactcctggcctcatatgatctgcccacctcggcctcccaaagtgctgggattacaggcgtgagccactgcgcctttctttgtatttgttcaagtaatatactgaaatatgtactgtgcctcccactttatggaggaggaaactgaggccagcaaatgaggctgtcatgggaggtggagacaggatttgaacctgcctcagtgcaggaggctcaagagcctctgtcttctctcagggcactgtgtgggagggtgagaaggagggaggcccacagaggcatgacctctgattgccactgtcacctgggccctgctctctgaagtctctgccaagcggggaggtggccgggggagggccctgctctgtgcagcctcccctcccccggcccgcagagttgagcacagagggacagaggcacggaacccccagaaatgtccctcctcagaaacaggctccaggccctgcctgccctgtgcctctgcgtgctggtcctggcctgcattgggggtgagaagaagtgggtggagggatgtggggcccacacctggtgggtgtgagtgtggctgtgtgtcctgtggctctgtagccacgtgagacatgagtacggagtgtgtgcgtttcatggcgtgcgtatgcatgtgcgtgtcggggagtgtgtgtgtcggtggctgagagtgaagtgtgaatgtcacattggtacaaactgggatcatctgtgtgtgtgcacgtgcgtgcgtggaagtgggagtatgcagtcgtggtaaaaaagtgcatgtctgtgtgcatatgtgtatttgtgtgcacctgtctctctgtggggtatgtgtgtgcaaaatatttgagtgtgtggacatgtgtgagggggtgagtgtgtgctggtgtgtacgtctgtgttttgcatatgcatttttttttttttttttgagacggagtctcactctgtcacccaggctggagtgcagtggtagcagtggtgcgatcttggctcactgcatcatccgcctacccgtttcaagggattctcctgcctcagtcttcagagtatttgggactacagacacacgccaccatgcctggctaattttttttttttgagacggagtctcgctctgttacccaggctggagtgcagtggcgtgatcttggctcactgcaacgtccgcctcccgggttcacgccattctcctgcctcagcctcccgagtagctgggactacaggagcccaccaccacgcctggctaattttttgtatttttactagagacggggtttcgccgtgttagccaggatggtctccatatcctgacctcgtgatccgcctgcctcggccttccaaagtgctaggattataggcgtgagccactgcgcctggccaatgcctggctaatttttttatatttttggtagagacagggttttgccatgttgcccaggctggtcttgaaatcctgacctcaggtgatccgcccgccttggcctcccaaagtgctgggattacaggcatgagccaccacgcccggccatgtactttatgttaaaatgggatcatattctagatcagcattatccagtagaaatttaaatttttaatacagggccaggcacggtggctcatgcctgtaatcccagcactttcggaggccgaggcgggtggatcgcaaggtcaggagatttgagatcatcctggctaacagatgggtaaaaacccatctctactaaaaatacaaaaaattagccatgcatggtggcatgcgcctgtagtcccagctactcgggaggctgaggccggagaatcacttgaacccgggaggcagaggttgcagtgagccgagatcgcgccactgcattccaacctgggtgacagagcgagactccgtctgaaaaaaaaaaaaaatttaacacgtatgtagacaatgtgcaaggcaccattccatgtgcatcgtatgtagtaactcttaattctcacgataaccctgaggtagatattattaccccgttctacaaaaggagaaacagtcctggggagacaggataagtcaccggccaaggcacacagctagctacatgtggcccccgcgtgacggctggtctctgtaggcgaggctttgtccagatgcgtgggtagaaggtctggcccggaaagaggaactgacagcaaggctaagccaatgtctgcccctgggggcagaaagtcacctcctgctctccctccactgtccacagaggtagctcagacagggtgggggtcacaggagaacgaagggagaagggggtagttcctgggcagcaaaatcaggtggtgaagggaggcatcagaggatggcaattagagaggccattagaggggaaccacaggcagacagggtgacaggagggactactgacacaaggtgaagagatggcccagccggacggggtggctcacatctgtaatcccagcattttgggagcccgaggtgggtggatcacttgaggtcaggagttcgaggccccaacatggcaaaaccccatctcttctaaaaatacaaaaattagccgggcatgatggcagatgcctgtaatccctgctactcgggaggctgaggcaggaaaattgcctgaatccaggaggtggaggttgcaatgagacgagatcatgacactgcactccaccctgggcaacagagcaagagactgactctgtctcataaaaaaaaagaaaaaagaaaaaaaaaaagagatggctgatggttaaagaggggttagcggtcaggggacacataagggtaaaggcaggaggcaagaggactggcagggggctgcccctgggccaccgggagcgacacaggatgagcatggagggaaagggagaaggggattctagggtcccagcctacccaagttgccctctggttccacctagcatgccagccagaggcccaggaaggaaccctgagccccccaccaaagctaaagatgagtcgctggagcctggtgaggggcaggatgaaggagctgctggagacagtggtgaacaggaccagagacgggtggcaatggttctggtgagggtgtgctgggctgggtggtgggaggggactcctgggtctgagggaggaggggctggggcctggacccctgagtctcagggaggaggaaagggtgggagtggggctgtgacccctaggtctgggaggagtggagggttagagctgagagcaggaactcctaggtcacagagaggagcggataaatggggcagagaacacctggggagagctggggcctccactgtgatgtcctctctcctgtaggagcccgagcaccttccggggcttcatgcagacctactatgacgaccacctgagggacctgggtccgctcaccaaggcctggttcctcgaatccaaagacagcctcttgaagaagacccacagcctgtgccccaggcttgtctgtggggacaaggaccagggttaaaatgttcataaaagccaggtgtggttgtggcgggtgcctgtagtcccagctactcaggaggctgaggtaggatgatggcttgagcccaggagttcgagaccagcctgggcaacacagcgagatctcttgggggtaaaacaaaaagaaaaaaaaaagttcatacttctccaataaataaagtctcacctgtgtccctgtctggatccttccccagtgtggccagaaaaaaacccaccccactgcctcccaggaatcaatgagtagaagaggtgacacctgatggggaaggaagagtagggaggtcgggaagggtatcaaggaataacaccctattgtgggcttgcggagaatgggggacttcaaggcgtgtcagtttcaggagggtgagggcaggagcgtgggtggagtcagcaggtccccatgatggccctcactgagagcttcgcccttgtctcctacaagctctgactccattcccagtgggcacccagcacctccaacccctccacagcccccaacccagcctctgtcggaggcgaattctcagagtgagggttccctgtcacttgagagaaggttccctgtgacgtgaccttgggggacgtcattgccctttctgtccccacccaccccctccgcagttctgttggccaggactttggcctagacaaaggatgggggttgtggctgtggagcggaagtgggtctcaaccactataaatcctctctgtgcccgtccggagctggtgaggacagcctgccagagtctggtaagaaagggactcagggtgcggggacaggggggcgtcagcagggagagggcaaagatcgataaagcaggaattttaagaggcacaatattagaagcccgtgttggaaccatgactgtgtgtgtgtgtgtgtgtgtgtgtgtgtgtgtgtgtgtgtgtgagagagagagagagggagatggagtctcgctatgtagcccaggctagactcaaactcctgggctcaagcaatcctcctgcctcagcctccccagtagctgggactacaggtgcaccaccacactccacaaatcacagaatttagaactgtagactatttgagcttctgcttagagttagggtggctgaggtggggaggatcccttgagcccaggagtttgaggatgcagtgagctgtgatcttgccaccgtgttccagcctgggtgacagagaaaccccatttctaaaaaagagaaagaaaaagggataggtacaatggctcatgcctgtaatcccagcactctgggaggccgaggcgggtggatcacttgaggtcaggagttcgacaccagccttaccagcatggtgaaaccgcatctatactaaaaatacaaaaattggccgggtgtggtagcatatgcctgtaatcccagctattccagaggctgagacaggagaattgcttgaacccaggaagcggaggttgcagtgagcccagatcgtgccactgtactctagcctgggtgacagagcaagactcagtcttggcggaaaaaaagaatgaaaaaatttaaaaaactaaaaaagaactgtaggctgggcgtggtggcttacacttgtaatccaaacgctttgggaggccaaggcaaacggatcacttgatgtcaggagttggagaccagcctggccaacatggtgaaaccccgtctctactaaaaatacaaaaattagacaggcatggtggtgcatgcttgtatttccagttactcaggaggctgaggcaggagaatcgctcgaacccggaagacagaggttgcggtgagccaaaattgcgccatcgcactccagcctgggcgagagaacaagaccttgtcttggaaaaaaaaaaagaattgtagaccatttgcttgtgttctttctccggggatcagatctcaccctctttctgccgtacttcctcatctcctacgtgtggatgatgatattgtgccctgtgcatgttcttcgtcaccaaaagtgcctctctcatagagcaggtgagaactcagtgaggagatgcagggacatgaggtctgacttagggcagagccctaaggtaacacatttgatctactgtaggtccttaatggtgtctgcagagcacctccctgcactgactcagccttagcaaagggcagaggctttgctgtgttccctgctgggcccagaactgtttaggtgctcaagaaagccttctaggctgggctcagtggctcacacctgtactcccagcaccctggggaggccgagatgggaggatcgcttgagcccaggagttccagaccagcctgggcaacaaaacaagtctcccatctctacaaaagaataaaaattagcagctgggcatggtggctcatgcctgtaattccagcactttgggaggccaaggcaggcaaatcacttgaggttaggagttcaagaccagcctggccaacatggtgaaaccccatctctactaaaaatacaaaaatcaggtggggcacagtggctcaagcctgtaatcctagcactttgggaggccaaggtgggcggatcacgaggtcagaagttcgagaccagcctggccagcatggtgaaaccccatctctactaaaaatacaaaatattagccgggcatggtggcaggtgcttgtgattccagctccttgggaggctgaggcagaagaattgctagaaccctggaggcagaggttgcagtgagccgagaacacgccactgcactccagcctgggtgacagagcgagactccatctcaaaaaatacgaaaacaaaaatcagccgggtggtggcgggtgcctgtaatcccagctactggggaggctgaggcaggagaattgcttgaacctgggaggtgggggttgcagtgagccaagattgcaccactgcactccagcctgggcaacagagtgagattccatctcaaaaaagaaaaaaataataattaaaatgttaaaatcaggagtagaatcacagaatgttggaaagtgaggcccaagaagggggctgtgtccaagtccatgcatgggaaacttgactgggacaccgagctcacacagagcaggatctcagtcccccccaccagagtggggcgtgaccacaggaacagccgcctccagtcagcctgccacatgacaccccctcaatgttccaggtctctggacactatgggcacacgactcctcccagctctgtttcttgtcctcctggtattgggatttggtgagtgtgggcttccggggagggaagccttggggaggggaatgagctccaagcatcttcccagcccaggcccttcttacctctgcctctgccctctcctcttcttccttcctcctttccccctgctgcagccccacgggctctcctgacacactctccccctgcagaggtccaggggacccaacagccccagcaagatgagatgcctagcccgaccttcctcacccaggtgaaggaatctctctccagttactgggagtcagcaaagacagccgcccagaacctgtacgagaagacatacctgcccgctgtagatgagaaactcaggtagcacctgcccctggagaaatggggtctggcccataccaccgactgcatccaggacccagaagttcaggccccagcccctcctccctcagacccaggagtccaggcctcagcccctcctccctcagacccaggagtccaggcccccagcccgtcctccctcagacccaggagtccaggcccccagcccctcctccctcagacccaggagtccaggtccccagaccctcctccctcagacccaggagtccaggcccccagcccctcctccctctaaccatctgtgctttctccccagggacttgtacagcaaaagcacagcagccatgagcacttacacaggcatttttactgaccaagttctttctgtgctgaagggagaggagtaacagccagaccccccatcagtggacaaggggagagtcccctactcccctgatcccccaggttcagactgagctcccccttcccagtagctcttgcatcctcctcccaactctagcctgaattcttttcaataaaaaatacaattcaagttgcttctcatggatggcactgcttttctgaggactcaagggccaagatggaggggctgactcagtccagccaacatttaatgagcacctactttatgtatggagctctaacccatgggtccatgggaataaagcagtgaatagtaacaataaataatcgtaacagcaattagagactaatctttattgaagtccggctttctctcttttatttttttattttttgagacagggtttcactctgtcacccaggctggacagcagtggtgcaatctcggctcactgcaccctccgcctcccaggttccagcgattctgtgtgcctcagcctctggagtagctgggattatgggcatgtgccactgtgcacggctaatgtttgtatttttagtagggttttgccagttggctaggctggtctcaaacttctgacctcaagtgatccacccgcctcagcctcccaaagtactggggtgacaggcatgagccaccgcgccatgccaaaatccagccttctcatttgtaaaataacaaatcatagacacagctagtccacagtggcctctgacagtctccagttgttaacggtgaatggtgtccaggtttttggcgtcctgaacaaagaactggacaaaacgcacaaacaaagcaaggaaggaatgaagggatttattgaaaacgaacatacactaaacagtgtgggagcgggcccaagcatatgggttcaaaagccctgttacagaatttttgggagtttaaattccccctagaggattccccttccactggttacttctggtacaccctatgtaaatggagaggatgaagaaaagttacaaagtcatttatggcctaccggagaggatgtttcctgttatagctgaagtgaattggccttatgttccctgcctccctattttcctgccttacagttgctggactgacacattttttattttatttattttgttttgagataaggtcttgctctgtcgcccaggctgaagtgcagtggtgagatcttggcttactgtagccttgaccttttgggctcaagagatcctcccatctcagcctcccaagtagttgggactagggatgcccactgccacacctggctaattttttgtatttttagtagagacggggtttcgtcaagttgcctaggctagtctccaattcctgggctcaagcgatctgcccaccttgcccttccaaagtgttgggattacgggtgtgaaccaccgcaccaggcctgggctgacactttaaacgtgccattgcaatcagtgtataatggtcccgtggcagagggagaatggtgcccaagtcagtacttcttggctgggacccaagaagacaaacctctagggccggcgtggtggctcacgcctgtaatcccagcactttggttggctgaggtgggcagatcatctgaggtcaggagttcaagaccagcctggccaacatggtgaaaccttgtctctaataaaaacacaaaaattagctaggggtggcccgcgcctgtaatcccagttacctggaggctgaggcaggagaattgcttgtaccctggaggcggagatagtgccactgcactccagcctgggcagcagagtgagactccgtctctaaaaaaaaaaaagaaaaacttattaaaaaaaaattgcaagcaaaaagcacagaaggcagaaggtgcaaataagcagaggctccatggtctgaaggaggccagtgctgggaccatgaatgaagggggctgggggccaagattcctgtatcctgagggagtccagggtggtactgctccccaagtcccatgggtggggctattggtctctggggatccactgcttgtatttctcctaatctgcttggcattaacctcctgccaggctttcaacacccttggggcagttttcccaggtcctgaggctgggcagctgagtccagtaaaaaacaggggccctggagagggactgtgggcaatgcccccgagtccccggggcctgggaagaacagaggctgccaagtgcagggggtggtggggaggggaagaccctggagtaacaatccctgctgtgtccacttggttcccacggactcaagccaagccaaagcactgcccggaccagttcggcttccaaccaatcctggtgctggcctcagactcctcctttctttctcagaaccccattcccctcagggcccccagagtccaggcccctagattcttcttcccctagaactcaggagtctgggaccccccagtcccttctcctcaggacctagaaggttggatccccagccccctttctcccttagaacctgaaatcacagcccttgatcagtattttgcgccccctagtggagagaagagtgggtctgtcctgtgacttacatacagcaggaatggcagaattttttacttattatgatttttaatttctttagagacagggtctcactctgtcacccaggctggagtgcagtaatgtgatcacagctaattgcaacctcgaacgaactcctgggctccggcatccctcccacctcagcctcagagtagctggaccacaggtggatgccaccacaccacctaattttgttaatttttagtagagctaggatctcgctatgtcaccaaggctggtcttaaactcctaggctcaagcgatccttctgcctcagcctcccagagtgctaggattacaggcatgagccacgaagcctggacggaatggcagaatttatttggtcactccacagagcataggaaggctctgcagggaacctgcctccacaggagccctgtccaaggtcacacttctcatgagaagcttagacctcatcatgctccaacacattggcccttgcagtgtatgagacttggagagcagattgcagcagtttgtatttatagctgagagcgcagttggggttgcagtgaggctggagaaagtttcaaagcccctcacttgcctgggctttccatggtcctctacctaaatttgtacaagtcattttgtactttttttttttcaagacagagtctcccttttcttgcccaggctggagtgcgatggcatgatctcggctcaccacaacctccgcttcccaggttcaagcgattctcctgccttggcctcccaagtagctgggattacaggcatgtaccaccatgcccagctaattttgtacttttagtagagatggggtttctccattttggtcaggctggtctcgaactcccgacctcaggtgatccaccagcctctgcctcccaaagtgctgggattacagtgtgagccaccacacccagccaattttgtactttttaaaagaggccaggccaggcgcggtggctcatgcctgtactcccagcactttgggagacagaggcaggcggatcacgaggtcaggagatcaagaccatcctggctaacacggtgaaaccccgtctctactaaaaatacaaaaaattagctgggcgtggtggtgggcgcctgtagtcccagctactccggaggctgagacaggagaatggtgtgaacccaggaggcggagcttgcattgagctgagatcatgccactgcactccagcctgggtgacagagcaagactccatctcaaaaaaaaaaaaaaaaagaggcccacaaaacacataagcttcagaccccacaaagtctctcctcaatccctgtcttagtctattcacttcatccctggacttaaaagactgggcctacacattcaaagaatcgttattaacaccattattgtctgtaacagtgaggatgaggcactgagttttctttttcttttctttcttcttttttggaggtggagtcttgctctgttgcccaggccggaattcagtggcatgatcttggctcactgcaacctctgcctcccgggttcaagcaattctcctgcctcagcctcccgagtagctggagttacagacgtccgccaccatgcccggctaatttttgtatttttagtagagacggggtttcacaatgttggccaggctggtcttgaactcccgacctcaggtgatccgcctgcctcggcctcccaaagtgctgggattacaggcgtgagccaccgcgcctggctgaggagcgaagttttctaaggttccttcttgtcctgtgttagccctcagagaggtaagtcactcaccttctgcacctagagagcctcatccccagggcaatcatccccagggcagtgctggagatacagcagtgaccacaacagtcccaggtcagcctgcccagttggggagacacacccatccctgacagtgatgacacaaagtgagcagggatggggtggaggagctgagggggcaagggaggataggaaaagggctcagagagagtttcctagagcgagagctactgttacagggctgagacctagaggaaagtggaggaaaccgataataaaatgataattatatattcagaatatcccaatgcaaagcttactctttttccaggtaatatataaggttcataatcacagcgctccaaatattgaccacttaagcatgaggcccagggcctgatgttttccattcgccatctaactacgtcttcccaataacacagcggggcaaaacgggaagacgaagaacgagtacgattatatccctggtttataaaaggggagaaactgaggctcaaacatagatgtcacttgtcaccagcctggccaacacggtgaaactccgtctctacttacaaaaaaaaaaaaaaaatgggaggctgacgcaggagaattgcttgaatccgggaggcagaggttgcagtgagccgagatcgcgccactgcactccagcctgggtgacagagcgagactccgtctcaaaaaaaaaaaaaaaattagccaggagtggtggcgtgctcctgtaatcccagctactcgggaggccgaggatgcagtgagccgaggttgcagtgagccgagatcgcgccattgcactccagcctgggggagagtgaggctccgtctaaaaaagaaaaaaaaagagagagagagacgtcacttgtccaggatatcttatccagtcagtagcaccacaagggttagaaccctggccagacatccacccaatttcacgggtgaacagttaacagcctctgagagtcttgtcctctctgggcctccgtaacaccctctccaaactaagggtctctcagcagatggccgggtttagagctgtacgaagacacacagctaatgaaaaattgtggaattctcagagcccgtgaagcctagcccacggatgcgaggtttggaccactgagggaacgcgcatgcgtgctaggcagggcagtccgaaggcttgggggtgtatcatagggtctcatcggaggtttgttggccgtaagacccctggaattggaactctaaaaacacagaaaggatatgagctcaggagacttgaacgaaagagttgtcttaggaagaggggtcagaagacaagggtgctgggcaaaaggctagttcttcgaatcagaatacggtggccagaaaggttcctctgacgaaagaggggcgtggttcgaagccgtacagtggccggtaaagctcaagaaacatggaacgaaaaggacgcgaagaatcggcagggagaagcggacaggatgtcccgaaaggctcatataaccgaaaaggcgggttaatgtgaagggacggaagggacagaacttgcgggaggcacatgctggccgagaaagtcctggagttcggagcatacagtgtttttattaggtggaaacaaacgggctgggagaaagacgagtacggtggccaggttggtccttccatagccggaagtggccttcctgagaggcgtggctgcggcactcttgccggatagggtggcccggcggggctaggaaagcgtgaaatctcgcgcgattgcgctgcgaagtcggggacggggcggggctggcggcgggggcggggacccggagcgggaagatggcggcggcgcaggaggcggacggggcccgcagcgccgtggtggcggccgggggaggcagctccggtcaggtacggaggccgagaggggactgagggggttcttccccagccggggggcctcccacggggcgtgtcctacctcttgtcacggaatcccgtgcactgggggctccttggccagagggaccttgaatacccggcccaggcagggccggaccgcccgggaggccggacggtgccgggaacagggccctgttgcgggtcggttcccctgcacgctcgagccgggcggccaccaggctcattgctcgatccggggagacagtggctcggaggggcgcaggcttgtaccttggcgcgctgggttctcaactccgcgattccatgctctgaggccgttcctagagtggtctggcgttcaggtctcgttgtagtgtttgaggtgtgcgcagtgattaattgggagttttctagctgtggggaagtcagtattagcagggcacggccgacagacccattttacagacgggaattcaaggaacagtgagactaaggcgcttctagaaggtcatcctggttaggtttgtaactttatgtagaagttacaagacactgctgacacagggactggtatggttgtggttttaatgtaaaatagttctatgggttaattagtcctggtgcggatgacttctgccccactgctgtcttaacacactgcagagcataccatttcaggcagctaccgttcaggcatttggggaatagatggagagacatgaaggtgctgtcgacccacccactgggatgtcactgacatgtgggaggcagctcaggggaaaggagtgcgggttgagaggggagaatgaagctgactctctgtgtgaccttgggcaagttcctttccctctttaggcctttatctctcccgtgttaaatgcagaggttggacaggagggccagccatatccctgctgtcaggggacgaagagaggagactgacatgtaaacagttgtaatcctgaatgattaggttggtgacaaaagtctgtgtcagggactgggggagcccagagaaagagcaagtggtatcacttgggtaggacacatggatgaaatttgtgtgatagagcccactgtatctgctctgaatcttttcagcattctcagccagggcctggcttcagggacagcttaggaaatgtttgttgagttagtgctggaatgaaggctcagttcctgtcttcaagggtttcccagtcttgctgaaaggaggtcgtttcccctctgggtttctgttgattattgggttgatggtggcttgagagaccagggcccaggttgttctcattgccctgagcttccagatggcactctgatcttctcttgtaccaactctgcttaaaaacaatcaagagttacccctttgcctttaggacaaagtacaaattctttaataaatcacagtcttgcacgatccgacacttttcttcagactagactaggatttctcgagctcggcactatcaacattttgaattggataatgctttgtttggggggctgccctgtgcattttaggatgtttagcagcatccgtggcctctacgcactagatgtcagtaggatccacgcccctccccagttgtgacaaccatatatgtctccagacattgccaaatgttccaagagcaggggggcaaagccatccctgcgtgagaacaactgcgctaaaggggatccgctgctctgaacctattttatttctaaacctcttttattgcctctcagtctctttcctcatagtctatgcacaggtctctcccctctttagctagttgatgtgtattagtcctacagatttcagatgtcccttcctgcagaaagccctctttgactgtctgggctccgctgtcccagccctgccctactgggtttcactgtctggggactgggaaccccaggagggcagagccaggactgccttgatcaccactgcttccttagcaccactcagctcagcgccaggcacagaggaggtgctcagtgtttgtggaatgagcggatcttgaaacagaggctgggctgaggtggaattccctgatgccgtggtggatccaggtaatcagtgaagacatgccgcaaaacctagcttcctcctgctcttgcctagccctggtggtctcagctacttcttggaccctttagcagatgttgctggggattgtgtgtgtgcgtggacgtgcagatccgagagcaggaactgtgtcttagtcactgatgtgtccacagccactgccacccttctcccatgcccagggcctagtgcacagcaggcacaccctctgcacagtctgctgctttagctagcctgctcctgtagccaggaactcggacacagaacccacagctttgccattccttccttcagcgaatgcgaattgagtctactccatgctaggcctttgctgatgctggagatacagctgtgaataaaataggtgctgccctcttgaaggcccttacacttatgttctagttggagctgaatttataggggaagcacagacagggacacacagtgaacaagataaataagaaaaacagcagttcagatggctctgcgtgccatggacagaaataaagctgggatggggataggaagtgaggggtgggtagaagagttgcaattaaatagggtagtctagaaggcctctctgaggaggtgacgcttgaacaaagacctgaaggaagtgagagagggagtcccaaagatacacgagggaaaagcttttcaggcaaaggagcagccagtgcgaaggccctaaagtgggaggtgcctggtgtgatgaaggaagggcgaggaggctggagcgggtgaggggagaggggtggctggggacagatgcagattatgccaagctttggaggccatggggaggacttggcctttactctgagggaaataggagctgaaaagagtgactctttttttttttttcttttttctgagacggagtctcgctttctcaccacaatctcggctcactgcaacctccgtctcctgggttcaggcaattcttctacctcagcctctcaagtagctgggattacaagcacctgccaccacacccagctaatttttgtatttttagtagagacagggtttcaccaggttggccaggctggtcttgaactcctgacctcaggtgatctgcccacctcggcctcccaaagtgctgggatttcaggcgtgagccaccacgtccagccttgtggtataatttagatggtataacgttcacctgttcttaggatagagtccattggctcctggtccatttatgcagttgtgtggtgcagccatcaccacagtctggtctgagaaagcttctgtcccctcaaaaagttcccttttacagtctctgctgctcccaatcctaggcagccacagaggtgctatctctgtaattttctaaaaatgtcttaaacaaggatctaaacaacatccagtcttttgtgtccagcttctttcattgggcataatgggtttgaggttcatgttgttacatagatctgcagttgttcatttttattttattttttacaacctaggatcagggaaatttggcctttggggaaatcctaaagtacgtgctcacagttgttccttttcactgctcagtggtagtctgcagacatgacacagtttattctttcagtccttgaaggatatttggattgtttttagtttttgtctgttgccaataatgctgctatgaacattcatgtacaggcttttctgtggctgtattttgtttctttttttttttttctaagtaagagagacagggtctccctgtgttgctcaggctggtctcgaactcctgggctcaatggatcctcctgccttggcctcccaaagtgctaggattataggcatgagccaccacacctggccactgtttgtttttgagacagagtcatgctctgtcgcctaggctggagtgcagtggtgtgatcctggttcactgtagcctcattctccaaggctcaattgatcctcccgtctcagcctcctgagtagctgggaccacaggcatgcactaccacacctggctaatttttgtatttttatagagatgaggtcttgctgtgttgcccaggctggtcttgaactcctgggctcaagcagtcttcctgccttggcctcctgaagttctgggattataggcgtgagccactgcgcctggtctggcttcatgttttctgcctcctgggtagccattcaggatgggtttgctggattgtgtagtaggtgcacatatgacttgttcaataactgccatattttccgaagtagctgtacttttactttcccccctagcagcatacgagggttcctgtttttccacatccctgccagcacttgtgattgtctttctgctgatagccatcctaataggtgtgaagtgacacctcattgtggttttaacttgcctttccgtgggaaggttcccagccagattgcccatcactaacgggtaagcgaagagacctgggagtcagtcagatgcagcttcaaatcctgacctggcatcaagtgtcctttcctgaccccaaatcagctcagacccattgaaacccatacttggacccctaaatttcccaatagctaggctggccttgaggagggggccttgtgcctgtctgatttcccttccccagccgacccccgccccatagatctcctcatcagaatgtggctttctctgtctcagcctaagggtctcacccagacgacccagacgtcaaagggagctcctcagggaggcctctctgaccacccactccaaagtggatccctgttcccaactcagttgctgtcacttccccctgcttgttttccatgtaccatttttaattatcctgtttaccgttctagtgtgtttccttctagatccccagctctgggtaagcagggcccagatttctgtctaaaatgttccagtattttcacaacctggtccacaggtcagagaggtgaagtgatgtgcccaaggtgtcacagccaagaacggtgggaccaggactatagctgaggtctgtttgaccctggagcccctccaatggtgtcctgtgctttgggagattacaggaaagagctcttgctggtgaaggggacaggaggtgacaagtgacacatttaacacatgtagcccctctaaccatgctcctgggacatttgctatctggtgggtaaggtgaatggagaaaacattgcagaggagtggactaggggctgtggaggagagggccagacactggagcctcagagggaagtgggtttgggtgacctgagcgtccggggtgagtccttcaggcagcggtggccacacaggtgtttatcacagccttgctctgtgccactggtgctcttgagctaactgtgactgtgatagccctggtcctgcctcttgaaggctgatggctgaggggacagctgggaggaggggtgaatgagaacaggactggggagctagcagggtgcgtgaagggtgagcagaacatccccttccaaacctggcattcagagagtctctgattgtgaccttctgtgtctgagtgaagagtcctcctctgggaagccgtgcctggctcccttgcctgccccccttcccttctgtcattctgcttctgcggtccttcctgagtgaccagacaagtggcttcacctctctgagcctccctttgctcagcagccggatggagctggtcatagttttggcctcaggattagtgtgctgtgtgctgtcacagacatgtcttgtggccgtggcttatggtagcagctgatagtctggttgtgtttttctgtgtctgtcccacctgctggaccaggggcccttggagggcagggttggccacagagggggcctcaggaatggtttgcccagggaaggctctttcagctaagccccagccttgaagaatctggcacctgccataagactccttctgttgttgtccccaatagccacctccttgcatcctggctccagccccagggaacagtggacagtcatcagaatcagactgtgcctctaatcttctgtttctgcacctgctgcttctctcacttcctcctttgtgccaccaacttgctatgttttaggtctcagcttcaatgcccccttctccaggaagttgccccgaaccctagactggaccaggtgcctctcagggctcctgcattcctgccccgttctggacagtcactgtctagagatgaatctttctcccccaccgggctgttaaaccccaggaggacagcaaaagactctctaggtcaccactgtccctaggtcacagaggtgctctgcgagtgttttcctcctaaaagaagaggaccgcaccttcccaggtgttttcactgattcattctccagttattgataagcacccactctttgcccagcctgtgcctggccttcatgcatgatggtgtctaagacagcccccgtgtccattctccctccttaccctggcctctgtcccccacaggtgaccagcaatggcagcatcgggagggacccgccagcggagacccagcctcagaacccaccggcccagccggcacccaatgcctggcaggtcatcaaaggtgtgctgtttaggtgagcagacgggacttgggtttgttcaccgaaaacattcaaataaaaataaggaagaaaggaaaagtcagctgatcagctgaggatggtgatcattactgtatggtagagttgctttttttctttttttttttgtatgatggaatgttttctaaaccttttttttactctggtaaaacatactgaagtagggagtctccctgaacctgttctggtttttggggggctacctgatttgtgaaaaaataaaaacacaaaaaatactgaagtagtttgctagggcccttgtatcaagtaatatagacggagtagcttaaacaactgaaataggaaattcattgtcttacagttctgaaggctggaagtccaggatccagctgtgggcaggggcagtttcttctgtggcttctctcctgggcttgcagaaggccgtcttctccctgtgtcttcatgtggtctttcctctgtgtgtgtctgtgtcctaagctcctcttatggggacactagtcatactggcttagtacccaccataatgacctcactgaaccttacttttttacagaccctatctgggccaggcacaatgactcaccctcataatcccagcattttgggaggccaggttggaaggactgcttgagcccaggagtttgagaccagcctgggcaacatagtaagaccctgtctctactaaaaataaaaaaatctggctgggcacggtggcttacacctacaatcccagcactttgggaggccgaggcgggtggatcacgaggtcaagagatcgagaccatcctggccaacatagtgataccccatctctactaaaaataaaaaaattccggaggctgagacaggagaatggcgtgaacccgggaggcggagcttgcagagagctgagatcgcgctactgcactccagcctgggcaacagagaaagactccgtctcaaaaaaaataaaaaatacaaaaaaaatacaaaaattagctgggtgtggtggcacgtgcctgtagtcccagctactcaggaggctgagggcaggagaatcgtttgaacccaggaggcagaggttgcggtgagctgagatcgtgccactgcattccagcctggggacagagtgagactccatctcaaaaaaaaaaaaaaaaaaaaagccaggtatggtgacacgtacctgtagtctcagctattcaagaggctgaggtaggaggatcacttgagccttggaaatttttttatttttattttatgtatttttttttttttttgagacggagtctcgctctgtcgcccaggctggagtgcagtggcacaatcttggctcactgcaagctccgcctcccgggttcacgccattctcctgcctcagcctcccgagtagctgggactacaggcacccgccaccacacctggctaattttttgtattttcagtagagatggggtttcaccgtgttagccaggatggtctctatctcctgacctcatgatccgcctgccttggcctcccaaagtgctgcgattacaggtgtgagccaccgcacccagcctatttttatttttgtaatggagtctcgctctgtttcccaggctggagtacagtggcgcgatctcagctcactgcaacctccacctcctgggttcaagcgattctcctgcctcagcctcctgagcagctggaattaaggtatgtgccaccatgcccagctaattttgtatttttagtagagatggggtttctccatgttggtcaggctggtctcgaactcccaacctcaggcaatctgcccgccttggcctcccaaagtgttgggattacaggcgtgagccactgcacccagtgcctagctaatttttgcttttttttttttttattagagatggggtttcactatgttgaccaggctggtctcgaactcctgacctcatgatccacccgcctcagcctcccaaagtgctgggattacaggcgtgagccactgggccctgcctgaccctcagaagttgaagctgcagtgagccgagatcacaccactgtactccagtctgggcatcagagtgagaccttatcgcaaaaaaaagttggggggaccctgtctctaaatctagtcacggtggtactgaaggttgagactttaacatatgaattttgggagacatgattcagcccacatctgcacataacatcaaatttaccattttaacctatgttttcattttaaccttttttttttttttttttttttttttttttgagacagcgtctcactttgtcacccaggctggagtgcagtagtgcaatctcggctcactgcagtctctgcctcctgggttcaagcgattctcctgcctcagccacctgagtagctgggactacaggcacctgccaccacgcctggctaatttttgtatttttagtggagatggggttttgccgtgttggccaggctggtctctaactcctgacctcaggtgatccacccgcctcagcctcctaaagtcctgggattataggcgtgagccaccacgcttggcccattttaaccatttttaagtatgtagtcctgtggcattaagtacatctccactgttgtgcccccatcaccattatccatcccgagaatttactcttcccaaactgaaattccatacccatcagacacaagcttcccatttcttcctccttgcaacacctggcagccacttttctatttcctgtctctctttcactactctagttagctcctgtatgtggaatcagacagcatttgtccttctgtgactgcctggtggtgacccttttacctgtgggttcacatgctattcctgggcagtgggaccccagggcctgttttttcaaagcccagcttctgtttgaggccctggggagatgctgggtggtggcgggggaatatgcttggcactgggttctatccttcctgcctagacctagtgacagtcaccttctttgctctgagcctttgtttactcctctgcaaaatagatattccttttattttttttttgctttttggagatgtattttagcaaaataagagaccacaccatgcagttaggcaatcagcttccctacttatgagatagaaggaattgcacagcagagatgtttacaacaatcatcccgccaggtgcggtggctcacgcctgcaatcccagcactttgggagaccgaggcaggcagatcatgaggtcaagagatcgagaccatcctggccaatatggtgaaaccccatctctactaaaaatacaaaaattagctgggtgtggtggcacaagcctgtagtcccagctactcgggaggctgaggcaggagaatcacttgaacctgggaggtagaggttgcagtgagccaagatcgtgccactgcactcaagcctggcgacagagcaagactgagtctcaaaaaaaaaagagaaaataaaaataaaacaatcatggctgggcgcggtggctcacgcctgtaatcccagcactttgggaggccaaggcaagcagatcacgaggtcaggagatcgagaccatcctggctaacacagtgaaacgccgtctctactgaaaatacaaaaaaattagccaggtgtggtggcgggcgcctgtagtcccagctactcaggaggctgaggcaagagaatggtgtgaacccaggaggcggagcttacagtgagcccaggtggtgccactgcactccagcctaggcgacagcgagactccgtctcaaaaaataaaacaaaaataaaaaaataaaacaatcattcctttggctagaatgtcttcacatggccatggccagctgcacgggaggctgggaaatgtggtctttaatctgggaaactgagcaccctgctggaaagcagggctcctattactgaggaagaagaggagagtggttatggggggcagctacttatctcttccataaaatcttattactggtttcccttagcttataaattatgagtgtttattttacaaaattaagtagttcaaacaatacgaagagtgaaaagaaaaagctaatgaaaaagtgtaatgtgggccgggcgcggtggctcacgcctgtaatcccagcactttgggaggccgaggtgggtggatcacgaggttaggagatcgagaccatcctggctaacacagtgaaactgcatctctactaaaaatataaaaaattagccgggcatggtggcaggcgcctatagtcccagctactcgggaggctgaggcaggaggatggcgtgaacctaggaggcggagcttgcagtgtgccaagatgccgccactgcactccagcctgggtgacagagcgagacacagtctcaaaaataaaaaagtgtaatgtgttggtggccatcccataggcacacatttttgtaattggccctaaatgggattatatatagatgctcacagatagagttgtttaaaatagagaaaagttaggaggcggggggcaggtagtgtcagatagcgtgtaagagcacagccctgctgacatctcagccctgccacctctgagctctgtggcctggtcaggttatcacccttcttgagcctcattttccacctcacagacagggaatcttgacaattagctcagggtgcatcagaaggattccaagagaattcatgtcaactgaggggtgcaggagctggcacgcacacagacaatgttggccatgattccttttgttgttcaacgtggaaaaaaaaaaagcctgagcaacacagtaagacccccatctctctctctctctctcttttttttgggagacagaatctcgctccgtcgcccaggctggagtgcagtggcgcgatctcggctcactgcaagctccgcctcctaggttcacgccattctcctgcctcagcctcccgagtagctgggactacaggcgcccgccacagcgcccggctaattttttgtatttttagtagagacagggtttcatcgtgttagccaggatagtctcgatctcctgacctcgctatccacgcacctcgggctcccaaagtgctgggattacaggcgtgagccaccgcgcctatcctgaccccatctctgtaaaaaactaaaaaattagctgggtgtgatggcgcacacctgtagtgccagctattagggaggccgaagagggaggatcgcttgagcccaggaggtcaaggctgcaatgggccgtgatgatactactgcactccagcctaggcaacagagtgagactgtatctcaaacaaacaaaaaccttaggaaatatatagtgaaacagtgaaaaaaaaaagttcatgaggccgggtgcagtggctcacgcctgtaatcccagcactttgggagaccaaggtaggtgaatcacctgaggtcgggagttccagaccagcctgaccaacatggagaaacccatctctgcaaaaaatacaaaattagccgggcatggcggcttatgcctgtaatcccagctattcaggaggctgaggcaggagaatcgcttgaacccgggaggcggaggttgcagtgagccgagatcatgccattttactccagcctgggcaacaagagtgaaactctgtcccaaaaaaaaaaaaaaacaactcatgatccctgatgtagtcactgatcacattctagactagagcagaactgcctgcctggtgtcctccaagagtgtcacacaggacactgagaaactgcaggaaagaaacctccccactctgttaagttgcaaaactgacatgtgtgcctcaaaaattcctgccatgtgccctacgcttctcagtcatgcgcccctgtcccttaccgtctccacttcacctcccctccccatggccacgtaaagacttcagattttcttatatatcaccttcttttttttcatgctgcaagcagctctgcatgaaaattatttttatctttcccttcatttttacataagaggtagcctgttttacacactgttctgctccttgatttttttcattaacaatatatctttgaaatctttccacgtcagtgcatagggagcttccttcagagagacatttttaatacaagtcacactgtaggctaatttcctttcttagaactaggcagcatcaaacatcagttcgggtgggtgctcggagaccatcttggctgcagttcttaaaatgggatccagggtttgttttcaggggcccatgaactccttgtagcttgaagctgattatgtgggaatagcctttctagatagcgggtggcgtctgtgtttttgagcacatgtggttacctggagtgggaggtggagcaggaactgggtatataaaggaatggggtgggagggagagttttgattatacgtcttttcatatatttaaaaatgttctgaacctgtgactgtagaatacctatttgggtgggagaaaggatttaatgtctgttttctttgcttactcaagtacatcaggaagcattagaaaggtccagtctcctgcaggcctgggtgcatggatgaggggccatggccatgagccctctgagagggtccacagaactgtgggcgtgtggatacacacaggacgttcttcaggggactggggatctggaatccaaaaaggcctggccttgttttatacatggggatctagaagcccagaggggttaggacccccacagccacacactaagccaggggcagagctgcctgggggcatcactgcttctacactctcccctggtgtgtttactaaaatgagagcctctgctggaggcatcggtatccccagagattgccaggtccagaccttccccagacgtgcatatcagggacttcatggggaggtagcgatggctcagctggaccgtggcccctaagaccctggaccccagggccttgtggcttctacaggcagaggcaagttcctgtgcctgatcctgcccctgatcagggctcagcagggaggcaccccacccacactagaatttactcatagtgtttttctgctccaaagttttttgtatgcctttttcctatgattaaaataacagtaatagctaacacttctcagtcacttactgggtatgcaccaggctccattctgaggtacgtgtgcgtgtgtcagatgtatatacacgctatataaacatatatataatttaatgtgtttaatgcttataaactaccctatgagagtaggcactgttattatccccatttcaaccattgaagttgaccactgaggtcacagtaagtagcagagctgggcttcagatgaagatactgtagtttagaggctgggctcataacctcttctgctgtatggttatcatacctataattaataagtacttgaatcatttaatcacatggctgcatgcagctgagaaacctccattaacacagtacaggttcatttctctctgatataccagtctggatggaggcagactaggattctgcagtcttcagtgacccagactccttgctgtttgttgtgccattgctaggtttttccctttatcctcatagcccaagacagctgctgaagattcagccatcacatccacactccaggcaacaggagagaagaataaatcaagaaggaatatttcttctctttaaggacacttttttttttttttttttgagatggagtcttactctgtcacccagactggagtccagtggcatgatctcggctcactgcgacctccacctcccaggttcaagcgattcttttgcctccgcctaccaagtagctgggattacaggcgcccgccaccacgcccggctaatttttgtatttttagtagagatggggtttcaccatgttggccaggttggtctcgaactcctgacctcaagtgttggcttcccaaagtgctgggattataggtgtaagccaccacgcccagcctcgttttggttttggtatctgttgttgctgctgattctcgctcataatgtcgtttccttttgtgcctggcttatctctgtctgtgtcctagtcattatacttgaaaagttatttgtaggaatttcagggctaggatgagcatattttcctacagagaggattgcctttgcttctgcctgggggcattaccaagtcctaggtttccttgcaccaggttcagggcttgagctgcccttcgtgactccttatcccacgagtggccttgcatacttcgccctgcatacctgttgtgcaactcctgggaatgggtaggccacctggttccttccttctcaggggtggaggcttgcaccttgtggggtcttagtttcctatagggtaggtctctggttacctcatatgttgtatgtgccctgggctagcatttttttttttttttttgagacagggtctcactctgttgcccaggctggagtgcagtggcatgatcgtggttcactgcagcctcgacctcctgggctcaggtgattctcccacctcagcctcctgagtagctgggaatataggcatggtgcgtgctgccatgcctggctaatttttgtattttttgtagaaactgtgtgttgcccaggctggtctcaaactcctgggctcaagcaatccacctacctcagcctcccagcgtgctggggttacaggtgtgagccaccgcgcccagcctaggccagcatttttgtcacccaccaaaacacctagcagatgtcctcggacacatgaagaagcttatagggctcctttacttattctttttttttttttcccctagacctgcaaatccaagatcctttacttctttttttttttttccttgagatggactttttgctcttgttgcccaggctggagtgccatggcacgatctcggttcactgcaacctccttctcctgggttcaagcgattctcctgccccagcttcccgaatagctgggattacaggcatgcaccaccactcctggctaatttttgtatttttagtagagatggggtttcaccatgttggccaggctggtcttgaactcctgacctcaggtgatccacccacctcggcctcccaaagtgctgggattacaggcttgagccaccgcgcccggccgatcctttactactttaggattcccactttcccttcagtttttgcctgaaggtttggtaacctacagtcgtgtccattcttcagagctgtctatttatatatattcatatgtaaacttgataaaaattacatgcatgagaacaaatacgagaatacgtgagcagcatatattctcattctatcaatatgtataattacaaatataaaatatattgatattttcttagtgtattaattttatcaagcttttccaattttttccagtgagagggttggtctgaataattaagcccactgttactaaaattggaactaacgtatcacttactatctgcttctccaaaaattctccaaaagttcagaaatgttgctctttctaagcttctgtgccttcggttcttttccttttcttttttaaaaaatttaattaattaattgattaatttttttgggacaagctctctatctcccaggctggagtgcagtggcgcaatcacgtctcactgcagccttgaccgtcagggctcaagtgactctctcacctcagtcccccaagtagctgggactacaggcatgggccaccatgcccagctaatttttatattttttgtagagacgggatttcatcatgttgcccaggctggtctcaaacttttgagctcaagcaatccgcctgcctcagcttcccaaagtgctgggattacaagcatgagctgctacacctgacccaattatacttttttttttttttttttttttgagatggagtctcactctgttgcaaggctggagggcagtggcgcaatctcggctcactgcaacctacgcctcccgggttcaagtgattctcctgcctcagcctcccaagtagatgggactagaggcacgcaccaccaggcccagttaatttttgtatttttagtagagacagggtttcaccatgttggccacgatgatctcgatttcttgacctcgtgatttgcccacttcagcctcccaaagttacaggcatgagccactgtgcctggcctctatacttcttaagttattttaaaatgtgtaattaaattactattgactagagttgccgtgttttgctaccaaatactagatctcattcattctttttttttttgagatggagtctcgctctgttgcccaggctggagtgcagtggcgcgatcttggctcactgcaacctctgcctcctgggttcacaccattctcctgcctcagcctccggagtagctgggactacaggcgcccgccaccatgcccagctaatttttttgtattttttagtagagacagggtttcaccatgttagccaggatggtctcaatctcctgacctcgtgatccgcccgccttggcctcccaaagtgctgggattacaggcatgagccgccgcgcccgtcctcgttcattctattttttgtagccattaaccatccccggttctgtgcttttgaagcgctaggattccagattctttcttttaaaaattttatgtttattattttttctttatttcttttttcttttaattcatccatctgcacactgaaggggttccagattcttagtctcctctcgggggatcccagggggctggatggcaggtttcccagtctgagtcaagagtcagcccctgcagccctgtggtcaccaggagctcctgcaggatttagagtcaagggtctgcatgcagaccagggcagtgccagctacccccacacactggcaaacggtggcatctgggctccctccccagatgtggtctttagggacatcttatctccttgccagccctgtgactaccttctcagggcctccctgacttggtcactagccccaggtcaggcgccagcatgtgctaagtcagaaggaagtcaggcgggtctatggcggagagccaaggcttggggactcaccaccttgctgcttctctcctcaggatcttcatcatctgggccatcagcagttggttccgccgagggccggcccctcaggaccaggcgggccccggaggagcyccacgcgtcgccagccgcaacctgttccccaaagacactttaatggtaactgccgggtggtagggcagacttgggaggtgatggggtgtggaggggtggaatgtggaggagtgatgtcagcagtcgggacagaccaggtccttgctcactggcaggtctaggaaaacaggtccagggttgaggaactctgggcccatccccaacacgtgagacctctgtcacctgggtccatccccagcacataaaacctgtgtcacccaaaagaaaaagcaaattcatttggttaaaataggttaaatcagggtctttggatgttatatttcaaaagtatgttcagcctttcagggttgcagagggagatgtgcaagggagagagtgtgagaggtggggagggcagggagccagcagaggctgacaggaggtgggcccggaaggagaggagacctgcacttccacagtgggcttgggcacaggcagggcagggcttcaggagcctccagagcaaaagcatttagatctgtcagtctaggcttttctgagcaaacatggccattggggcttgagaaaggaggaagttcttgttgggtcacagtgggtttttttttgttttttttttttttttgagatggagtctcactctgtcgcccaggctagagtgcagtggcataatcttagctcactgcaacctctgcctyccgggctccagtgatcctcctgcctcagcctcacgactagctgggattacaggcatgtgccaccacgtccagctaattttttgtatttttagtagagatggggttttacctttttggctacgctggtctcgaactcctgacctcaagtggtctacccgccttggcctcccaacgtgctgggatcacaggcatgagccaccgtgcccggtggctcacagtgcttttgtagctctggactgcttcgtccataagcctgcagagctctgaccaggaaggcccagcagccatgagggcaggagatcattcagggagctcctgccccttcctacccctaaattctaattggcaggctggccagtctccaagtgttctttgttcgttgacttcacaggctcagaccaggacaaacatggtggtatgagaaaagagaaaatatgtcctctctgctgctcttcctctctcctctcccctgtcctccataattactgttcccctgagtgtgctgaccgctgccatagctctttagccagcctgcagaggctctgaagagcaggcctgagctctgttcccttcctgtcccaacagaacctgcatgtgtacatctcagagcacgagcactttacagacttcaacgccacgtcggcactcttctgggaacagcacgatcttgtgtatggcgactggactagcggcgagaactcagacggctgctacgagcactttgctgagctcgatatcccacaggtgggggcagctctcggtttctggccccatggctgcttgactggcactgaaggaccttttcctccagtccgctccttgctgagagcatgtggagttygggctccaggcttggcccttccctgggctcacatggtctgtgaccacaagccagtccctgagatctctgggcttcactttcccctacctgaaaaaggtagataggggtggaattggcctgggaccctcccagctacctctaaggttgtgcagtcctccactttaaactggtgaaagattagtaattgtccttggggatgtttgcctatcaccagtttatcaggcagccccgtttcaaaataatattagttaatgttgattgagctaagtgcagggtactaagctaggctgactcatggaaatttcccggcaaccctgtgaagcaggaactgttattattctcatttaacatgtgaggaaactgagacagagagaaggaaagtgatttacccaaggccacatcgcatgagagattcagactcaggctctacggctgtggactctcgcagccctaggctcaaatccaacctcctccaggaagccctccctgactcacagagcactcaggcttggttaagcaccctctctgggttctcacacctgctgggcttccccatcccagcccattctggggcctcattgggactcctgtatgggactgtgagccttgtgataataaggctggggctgcctagatcacttccatgtccccagcactgcccaacgtggggctgggtgcagaatcagcaagtattgaacaagtaaaagggacatctctctttggggccttcttcggctgagtccaagacagctgccctcattcctttctccccagcaggccttctcagctttggggtggagggcacatttctgttctatttctgtctgggtagctagaagcagaatgtggacacagtcattctggtttttttttttgttttttgtttttttttgagacagcgtctcgctctgtcacccagtctggagggcagtggcgcaaccttggctcactgcaacttcacctcccaggttcaagcgattctcatgtgccagcctcctgagtagctgggactaaggcacacatgatcacacccagctaatttttttattttttagtagagacaaggtttcactatgttggccaggttggccttgaactcctgacctcaagtgatccacctaccttggtctcccaaagtgctgggattacaggcgtgagacaccgcgtccagccatcattcttttctttttgagatggggtcttgctctgttgcctaggctgaagtgcagtggtgcaattacagctcactgcagcctcaacctcctgggctcaagcaatcttttcacctcagcctcccaagtagctgggacaacaggcatgcaccaccatgcccagctaattttttgtagagatggggtctcaacatgtttcccaggctggtctcaaactcctctgctcaagcgatcctctcacctcagcctctcaaagtgctggaattacaggcatgaaccaccccacctggctggactttctgacctgcactgagaggtgactcccacagagwcctcaagcccagcccccaggccttgccacgagatccaaggaaggaccagggcctggcaggcccagcagggggatctgcttccaagggcttggatctaagtcgaagcttcagggtggggtccaagtggacttaaaaggcaggagagctgggcacagtggcatgtgcctgtaggcacagctactcaggaggctgaggtgggagaatggccagagcccaggagtttaagactgtagtgtgccatgatcgcaactgcaaatagccagtgcactccagcctgggcaacacaggaagaccccatctctaaaaaagatagggagagtgaggagaacacaatgtggccaactgaattcgagctctgcacaaggatcagagaggttcagtgctcgcctttgtctccacccagtgcccctggacaacttgcctcccttcttgaagcctcagtttcctcatctggatcaagtgagaatagtcccccttccctgggaggcaaggagacttgatgagataatgaggaagacttgggcagagaggggccagctggaggtagcagggagtagcacccaggagcccacagactgggtttccatctgcgtacttgccacacactatgtgaccccttggcatgagccccgtttgcctcatctgcaaaatggggtggtaacatgacccattgcataaggttgacatgttatatgtgtgttaactcgttagattaggaagctgttgtctgaagtgcccagggcagggtctggcccatagtaggagctccatgtcggtcagctgcttcttcctgttgagtgagcttaacgagagctcgttgactgagctgtgtgccagtgctccaggtagtccctgcagtggtgccctcgggtcagtgctgtgggaacttcgcatcctctaggtggggccctgaggctcagagagaagctgagctcacacggccatggcaggtagagcgggcgtctgagtctgtctgactccagcatttacctctctgccacccagctacatgccccaccctgagtactcagtaaatggccagagagttgagggggaggaaactgctgcagatgggtgccaggcagggctttaacgtttccctcaccccagttgcccagcctgcccacctgaccttccgtcttttgcagagcgtccagcagaacggctccatctacatccacgtttacttcaccaagagtggcttccacccagacccccggcagaaggccctgtaccgccggcttgccacagtccacatgtcccggagtaagtcgctcccctgcagccaggacccactgtccaggaggccagcatcctgggagcccccaggctaatgtggcggacaaatcccaagtccaggagggcaggcaggaagcctgtgctcaaagagggtgggattggcagggcaggctcaagccccacccagcctgaaagagccctgtggacactaagcagggatacccacggaggaagggagacccacggaggctcagggaccagagagaaattggccagaaaaagcagctggagacagggactcttggagaggaggagacgtccttcaccaagggggaagggccagggttgacttttgcacagtaggggcctgatagaagtagacactcaaaaataatttgtgggctgggtgcagtggttcatgcctgtaatcctagcactttgggagacaaggtgggcagattgcttgagcccaggagtttgagaccagcctgggaaacatgacaaaaccctgtctctaccaaaaaagacacaaaaactagctgggcgtgtgcctgtagtcccagctgctcaggaggctgaggtgggaggatcgcttgagcccaggaggtggaggttgcagtgagccagaatcacaccactgcactccagcctgggtgacagaccgagaacctgtctcaaaaagatagatagaggccgggcacagtggctcacgcctgtaatcccaggactttgggaggccgaggcgggtgaatcacaaggtcaagagatagagaccatcctggccaacacggtgaaaccccgtctctactaaaaatacaaaaattagctgggtgtagtagcatgctcctgtagtcccagctacttgggaggctgaggcaggagaatcgcttgaatccaggaggcggaggttgcattgagctgagatcacgccattgcactccagcctggtgacacagcaagactccgtctccgtctcaaaaaaaaaaaaaaatagataaaattcaaagaacagtgtgggcaacataatgagacttcgttgctacaaaaattaatagccaggtatggtggtgagcacctgtggttccagctacatgggaggctgaggtgggaggatcgcttgaacctgggaggtcaaggatgcagtgagctgtgattgcactacagctttccagcctgggcgacagagcaagtccacgtctctgaaaaaacaatagtaataaaaaataagactaccacttctactcccatgataactcattaatccattaaaccactaatccatgaatgggttaatcagttcctgaggggagggtcctcatgacccagtcacctcttaaaagcctcatctctcagtactggcacattggggattaagtttcactgggagtggggagtactagagtacatcagtagtcccagctacttgggaggctgaggtgggagaatcagcatgagttttggccaggacaaacattcaaaccatagcattgtccgtcctcttgttttcgagargttaataattgttgtcatctttctgcttgcctggctctttttttttttttttttgagacagggtctcactatgtcgcccaggctggagtgcagtggactatctcagctcaccacaatttccacctcccaagttcaagcgattctcccaccttagcctccaaaatagctgggactacaggcacacgccactacgcccggctagtttttgtatttttagtagagacggggtttcgccatgttggccaggctggtctcaaactcctgacctcaagtgatcgtctgcctcggcctcccaaagtgctgggattacaggtgtgagctgccacacccagccttgcttggttctctgtgagctttttccctgagtcctctgtctcctgatgggcagccgtagaaatctcttgctgtacctgtttgagcggagctggagaatggcttcctcagaaagccccccattcttctaacgggagttctgtgtactccacctagctttcactttattgaggactattccagacattccctgtggatttggttaagatccatctggctggttttgggtggcgcagcaacagacagaattctatttgtatgagttaggtcttacctacttcttttagtacaaaaatatcctaaaggatggtaatttttttttatcacctatactggatgaaatgaaaagttgactctatgtgggtccctagaaatgacttggaaaggtcttctggagttacttgagcccctttctgagtgagtgtgtctgmagaatgtgctgcgttggtatgtcccacccggctgacgtccatgtggtgagatctttggagaaccaggcagaagtggcttgagggggtgtgacctacagggttggtctcacagatgtttccctgcagggggatacgtcaggggtctgggctaaaatgcccgatgtttcagaggtcgctctgaaggtgacccaggtgggtggctcttcaccctattcttgtaccccgtttgacgatcacctaatcatcccgttgacccaaatcgatgccagtattttctgcagttttgtctttggtgagtgtgatccatgtcactgtgtggtgaggtttattcacagtcagtctggtctgtaaaatagaacctgcagacagtgaacctgaaaagcatactaggatcatccaggcctccctccccagccttggagctgggaccctcaaagcagggacatagaaggacttggagtgagccacccacaaactccagggtgaaggagagtgtgagttcagaaaagcccccttttggctggttgtggtggctcatgcctggaaacccagcactttgggaagccaaggcaagcagatcacttgaggtcaggacttcgagaccagcctggccaacatggtgaaaccctgtctctactaaaaatacaaaacttagctgggcatggtggcacatgcctgtaatcccagttactcgggaagctgaggtgggagaatcttttggaccccggaggcggagattgcagtgagccgagatcgtgccactgtactctagcctgggcgacagagcaagactccatctcaaaaaaaaaaaaaaaaaaagaaaagaaaagccccttttatccccaagaggccaataatcagtattctagagcagctccgtcccatggagataggatgtgagccagagaaggcattaaaatttttccaatagaaaaatactaaagagtaaaaaggtaaagagaggccaggcacggtggctcatgcctgtagtcccagcactttgggaggccaaagtcagaggatcgcttgagcccaggagtttgaggccagccctggcaacatagggagacctcatctctacaaaaaaaaattttattttattttatttattttatttcattttatttatttattattatttttttttgagatgragtcttgctctgttgcccaggctggagtgcagtggtgcagtctcggctcactgcaagctctgcctcccgggttcacgccattctcctgcctcagcctcctgagtagctgggactacaggcgcccgccaccacgcccggctaatggtttttttgtatttttagtagagaccaggtttcaccgtgttagccaggatggtcttgatctcctgacctcgtgatccacccgccttggcctcccaaagcactgggattacaggcatgagccagcgcgcctggcctattttattttatttttttttgagacagagtttcactcttgttgcccaggctggagtacagtggcatgatcttggctcgccacagcctccacctcccaggttcaagcaattctgcctcagcctcccaagtagctgggattacagtcatgtgtcaccacgcccagctaattttgtatttatagtagagatagggtttctccatgttggtcaggctggtctcgaactcccgacctcaggggacccacctgccttggcctcccaaagtgttgggattacaggcgtgagccaaaaaatttttttaaattagccagatatggtggtgcgcaacctgtagtgtcctccgactcaggaggctcaggtagaaggatcatttgagtccaggaggtcaaggctgcagtgaactgtgatcaggccactgcacttcagcctgagcaacaaagcgagaccctgtctcaaaaagaaatataaataaaataataaaaaggtaaggccagggccgtgatggctcacacctgtaatcccagcactttgggaggccaaggctagaggattgcttgagcctaggagttcgagaccagcctgggcaacatggcaaaaccccccctaataaaaatacaaaaattagccaggcatggtggcacatgcctgtaatcccagctactcgggagcctgaggtaggaggatcacccaagcccaggaggttgaggctgcagtgatcacaccactgcactctagcctggataacaaaaggagaccctgtctcacaaataaataaataaaaaggtaaagaaaaaccatgagattaatatcaataatagtttaattgagctcaacatattctcgtttcaacatatgatcagtataaaaagtgagatattttacatttttgtttccccttgtgtcagttttcagaatctagtgtgtgtgactgggcacggtggctcacatctgtaatcccagcactttgggaggttgaggcaggtggatcacttgaggccaggagtttgagaccagcctggccaacataatgaaaccccagctatactaaaaatacaaaaattaggcgggcatggtggctaacgcttgtaattccgtctactcgggaggctgaggcaggagaatcacttgaacccagaaggcagaggttgcagtgagctgaaatcgtgccactgcactctagtctgggcgacagagcgagactatgtcaaaaaaaaaaaaaagggtctagcgtgtgttttatatcatagcacttcttggtttggaccagccatatttgcagtgcccagtagctgcatgtggccagcaaccctgatactggatggtgcagctctagaagattttcctccaagaaaggggggctttttcctccccacaggagccaggtccatctggtctggatgcctccaagctgcagaatgtgttctttgcctgagccaaagcctctctcccctgtgcctccccctccaccagccagcgctgccctctggggctctcccttccctggacagtctctgtcaggtgtggacacgattggggcatgtccccctggaattttctccaagtcaacccttgagtgttggtttctccccctggacacaggaggaagatccccaatgatttaataatcatagaaatgatgaggattggccaggtggctcaagcctgtagtcccagcaatttgagaggccgaggcaggtggatcacttgaggttagaatttgagaccagcctggccaacatggttaaactccgtctctactaaaaatacaaaaattgctggtcatggtggtggatgcctgtaatcccggctactcgggaggctgaggcaggagaattgcttgaacctaggaggcagaggttacagtgagctgaagtcatgccactgctctctagcctgggcaacagagtgagactccatctcaaaaaaaaaaaaaaaaatgaggatgacgtttctgctaataagcagtaggccctgggccaagaagtggtgaggcttttcttccttctttagggaagtgacatcactcaccagcatcccttagcttgtaggattcagagccaagattgcccccagagcccccgctgttggccaggtctctttcccctttccctgtctctccctggccccaggggacaggatagagacttgagggagggcagactgagttttccttcatagcataaggaagagctgaaaagtccccgggctcagtggctcacgcctgtcatcccagcactttgggagactgaggtgggcagatcacgaggccaggagattgagaccagcctgggcaacatggtgacaccctgtctctactaaaaatacaaaattagccgggcgtggtggtacacgcctgtagtcccagctacccaggaggctgaggtgggagaatagctggaacctgggagtcggaggttgcagtgagccaagatcacaccactgcactgcagcttggatgacagagcgagactctgtctcaaaaaaaaaaaaaaaaaaaaaaaaaaaagaaaagaaaaaagaaaaatacttagcttcttttcgggccaggtgcggcagctcacacctgtaatcccagcactttgggaggccaaggtgggcagatcacgagatcaggagattgagacaatcctggctaacacagtgaaaccctgtctttactaaaaatacaaaaaattagcagagcctggtggcacacgcctgtaatcccagctacttgagaggctgaggcaggagaattgcttgaacccaggaggcggaggttgcagtgagccgagattgtgcyactgcactccagcctgggtgacagagcgagactctgtctccagaaaaaaaacagaaacgtccccaggccagggcagaggttgggagatggagcgtgggcacgcacaagccccttcctccccggcagcatttgggacaacatggcagggggcctgtggccaactgggcctctgcgagaggaagtgaggccaactcctggctggggattcacagcctcaaagtgtttctcatcttggtttctcatgttggtggcttcaggccttttttggaaccgtctgctgcctctttatagtcatgtattcaactggtcatcaccgagcctgtgcaggcgccccatgtgtrttcaaacaggccctgcccctacccgcatttccgcacagagtttgcagactggttgcagggacagacagcaggcaggtaaaccactggctaagtggttttggatagtggtgaaatgttgtgaaggaaacaagctggcaggagaatgactgcataggctcattcagtggggtggccagggaagccctgtggaagaaggacattctgccagggacttgaatgccacggaggagccaggccacgaagattgtgtcagggcatgggttcctgggacacggggcagcacgcctgaaggccccgggttggcatgtttgagaagtggaaggtggtgagggttgagaggtcaccggggctacggtgagtgtctggggttccaaagctgcgggatggccatgatcagtcacttgtttttatttatttgtttgtttgttttctttttctttttgaaacggagtttcgctcttgttgcccaggctggagtgcaacagtgcgatctcagcttcctgtaacctccacctccctagttcaagcgattctcctgcctcagccttccgagtagctgggattacaggcacccgccaccacatccggctgatttttgtatttttattagagacggggggtttcaccatgctggccaggctggtctctaactcctgacctcaggggatctgcccgccccagcctcccaaagtgctgggattacagtgccctactgagctggggtttctgcctggggcatttggtgatggtggcgtccccatgatcatgaggaactgggattcgttgagatttggggaggcagttctggcattccaggtcacattgatctcagcaggtgagtgcaaggtggatgccaggagaccgtgagccgttgctggtgggcaggggtccgggctctggaggctgcaggtgccrgcaggtctcacgtcccctcctttcccacctcccaaccacagtgatcaacaaatacaagcgcagacgatttcagaaaaccaagaacctgctgacaggagagacagaagcggacccagaaatgatcaaggtaaaygggcagggttgtcagggcctatagggaccaagccaggccattcacagctcatcccagaccactggggctgtcatctgtcaccaccactgaaccaccatgccggctcggtcatgccacctcccctccctgagcactgggctcctcctctgggaaatggggtcaggaggcagctgtctctcagggagtgaggaggatcccagacaaggttacctgagcctcttgccagcctgggaggggtctacatcacagtcccattgtcacatgaggacacttgctcagtctcagccggaagtggcaggccagggactctcacccacacagccaggccccagagcccaagctcagcctggctccaagcacacacacgagaatatggctttagtaggaactgcaggattcatagttgctgtcactcccrgtgggctggggagccgggcagttaatctgtggttaacctgcagtgggcactaagagacttcctctctctgcgggtggtcctgtgttgggggggtggtccctgctcatggagctgaggccaccgtgcaagagtgtgtggagcctgctgtcatgaggctgggcttcgcagcctggcctaggatgccagccctgcctctacctctacctcggttttctacatgtggggtgggaggatcctgtcggtggccggaagggtcctgggtggcggaatctctaagcctagggaggagagccttctgccagcagttgctgtggtggctgatattctgctgccagggttgtcaggggagatggctcatgcctgttttcccagcattttgggaggccgaagcagaaggatcacttgagcccggaagttcaagatcagcccaggcagcatagtgagaccccatctcttccaaaaaagagaaaaaagaaagaaagaaaagaagctgtccatggtggctcacgcctctaatcccagcactttgggaggccgaggtgggaggatcgtgcttgagcccaggaattcgagaccagcttgggcagcatagtgagaccccatctcagaaaaaaaagaaagcaaagattaagattttctcgggaaccctggggaggaagtgtacagagagtgatagtccccgagcacttccacctgcctctgaggtccttccccccatgttgcctcagagggctgaggactatgggcctgtggaggtgatctcccattggcaccccaacatcaccatcaacatcgtggacgaccacacgccgtgggtgaagggcagtgtgccccctcccctggatcaatgtaagctccccagccctgccagctgcctgcagagcctttgagagggtgctcggggtccatctccttgtcttctcctggccctgtccccctgagagagctttccagggctccaccctcccaagctcccaccctgtcctatccccttcccatgtcctctccctctcccacaccaccacccctggggaccccaggactgacttctacacgccagcatcggtccgcaatcaagtgccatccagcccacaaactgttttcaaaaaatgtcttatcacttgccagcttttgaaattgaggcagtatcacttaaaagccacaatttctggcttattttataaaactgggttacatggtcacccacagggcagccgtgggctggagctgagccacagctgcccccttcagtggggacctgcctgccctttgcctcagtcccctctgctgaggtcaaggcrccctttagctcctcatggtgtggcctagaaatgtcccctgtcctccagtctctgtagaggggccctgttgggtctctccagacatctgaggcctgcgggtaccctggcctcctgcccgggccaaatggtgcccctgccccacgtgctgcagatgtgaagttcgacgccgtgagcggtgactactatcccatcatctacttcaatgactactggaacctgcagaaggactactaccccatcaacgagagcctggccagcctgccgctccgcgtctccttctgcccactctcgctttggcgctggcagctctatgctgcccagagcaccaagtcgccctggaacttcctgggygatgagttgtacgagcagtcagatgaggagcaggactcggtgaaggtgagtgcggccggtgtgggcgggacttcccggtgccttcctgggcgcaagaggccaagaggaagtgtgccaggcctgggctgtgggacctcccgcctggtgctcctctgcccacagtttcacaacctcccaggtcccttctccacagtgaaaggaagtgggcacccagccctccagccctagatgactgggggtcctctccccaggctgttctgttggaccctttgggtccagacctgtcccttcctccttctgtcccagaccttgtgtccctggccctggctccaactctgtgtctctgccatctcactgggtcctgaaatgtcagcctgtgtctgtggcgtgaggctcggctttgcctcctgggctgtcgtcactgttgggtctctgctcctggctcccagtgtcccttcacccactccccgcagcactcccttggcctctgcctcttcccctagtgccatctccccgtctcttctgtctttgtgagtcrccctcctctctctccccatctgcccatctctgacccagtctcctcctggctggcccaccttcagcctccctctacaggcggccccaggggcagccctcgggacaaaagctagtgaaggtgctcctgggtggggacaggctgtgctcacatgtgtcccctgcaggtggccctgctggagaccaacccctacctgctggcgctcaccatcatcgtgtctatcgttcacagtgtcttcgagttcctggccttcaagaatggtaggaacaggaccccagggctagtgagaggctgtgcagggtgggggacaggacctgcccccttcctcctcccctccctccccacatgtcctccccctgcctggggtctctcagccccactctccagaggcctagtgagctggggaggggcagtggccccaaaactcccaacccagaaattcccacccaccgggtgtggagctgagggaggggctggcccgctggtggggcagaggccaggccaatactgccaggaagcagggctggggaactccagagccaagagcagggaagccccggagctgctcccgccaccctgcccggcaggctgcctgctgcgggaggccgcttagggctgagtggacggggcctgcccaagtgggaaggaggagcactgtcccccaaaggtccctaggttctaaggctgaccatactgatggccagcgtttgaggagaagcagccacatgccaggcactgtcctgggtaccctccccagtagctccttgagccctrtgggagccagaggctcagggatgtcacttgcccagtcacacggttcctaaggggcagatggttccagccccaactctcatcttctaggccctgcaggccacttcttccttgcccagagcaccccagtctgaaggagtggcctgcggccctgtagctcccgcaggcggcaagaggaatgagtagtagtattcctggtattaagatgctattgccggcctggtggtggctctcgcctgtaatcccagcactttgggaggccaaggtgggaggatcacctaagccccggagtttgagaccagcctgggcaacaaagcgagattcgtttctacacaattttttttaagaattagctgggcatggcagcgygtgcctatggtctcagctactcgggaggcttgggcctgaaaggtcaaggctgccgtgagccatgatcacaccactgaactccatcctaggcaacagagtgacaccctgttccaaaaaaaaggacgctcttgccattattgagaactaccatctggaagaatgcagtgtcatacgggcacaggagctggtgccgaccccagccagccatctaccagctgtcgctgggagacgggacccttctgcctaggagctggcttggctggggtccagtgagaaatgaggcacaagaaggctgtcctccccagtgtcatgcagcagggggcgcaggcctcacttggcaccagtgctgtgtggcctccctggtctaaggagaggcttgggcccaactgctcccacgagaacccaccagaaccctgtctccagacccattcttctcagttgggacaggggtcattctgatgggcaggggtgggtggggtgaggctatggagtgtgccagagctctgggatgtgggggagctctgggatgtgggggagctctgggatggggtagggtgcacatggaccagaattc

SEQ ID NO: 28 - DNA, 172111 bp, Homo sapiens
gaattcatgtcaactgaggggtgcaggagctggcacgcacacagacaatgttggccatgattccttttgttgttcaacgtggaaaaaaaaaaagcctgagcaacacagtaagacccccatctctctctctctctctcttttttttgggagacagaatctcgctccgtcgcccaggctggagtgcagtggcgcgatctcggctcactgcaagctccgcctcctaggttcacgccattctcctgcctcagcctcccgagtagctgggactacaggcgcccgccacagcgcccggctaattttttgtatttttagtagagacagggtttcatcgtgttagccaggatagtctcgatctcctgacctcgctatccacgcacctcgggctcccaaagtgctgggattacaggcgtgagccaccgcgcctatcctgaccccatctctgtaaaaaactaaaaaattagctgggtgtgatggcgcacacctgtagtgccagctattagggaggccgaagagggaggatcgcttgagcccaggaggtcaaggctgcaatgggccgtgatgatactactgcactccagcctaggcaacagagtgagactgtatctcaaacaaacaaaaaccttaggaaatatatagtgaaacagtgaaaaaaaaaagttcatgaggccgggtgcagtggctcacgcctgtaatcccagcactttgggagaccaaggtaggtgaatcacctgaggtcgggagttccagaccagcctgaccaacatggagaaacccatctctgcaaaaaatacaaaattagccgggcatggcggcttatgcctgtaatcccagctattcaggaggctgaggcaggagaatcgcttgaacccgggaggcggaggttgcagtgagccgagatcatgccattttactccagcctgggcaacaagagtgaaactctgtcccaaaaaaaaaaaaaaacaactcatgatccctgatgtagtcactgatcacattctagactagagcagaactgcctgcctggtgtcctccaagagtgtcacacaggacactgagaaactgcaggaaagaaacctccccactctgttaagttgcaaaactgacatgtgtgcctcaaaaattcctgccatgtgccctacgcttctcagtcatgcgcccctgtcccttaccgtctccacttcacctcccctccccatggccacgtaaagacttcagattttcttatatatcaccttcttttttttcatgctgcaagcagctctgcatgaaaattatttttatctttcccttcatttttacataagaggtagcctgttttacacactgttctgctccttgatttttttcattaacaatatatctttgaaatctttccacgtcagtgcatagggagcttccttcagagagacatttttaatacaagtcacactgtaggctaatttcctttcttagaactaggcagcatcaaacatcagttcgggtgggtgctcggagaccatcttggctgcagttcttaaaatgggatccagggtttgttttcaggggcccatgaactccttgtagcttgaagctgattatgtgggaatagcctttctagatagcgggtggcgtctgtgtttttgagcacatgtggttacctggagtgggaggtggagcaggaactgggtatataaaggaatggggtgggagggagagttttgattatacgtcttttcatatatttaaaaatgttctgaacctgtgactgtagaatacctatttgggtgggagaaaggatttaatgtctgttttctttgcttactcaagtacatcaggaagcattagaaaggtccagtctcctgcaggcctgggtgcatggatgaggggccatggccatgagccctctgagagggtccacagaactgtgggcgtgtggatacacacaggacgttcttcaggggactggggatctggaatccaaaaaggcctggccttgttttatacatggggatctagaagcccagaggggttaggacccccacagccacacactaagccaggggcagagctgcctgggggcatcactgcttctacactctcccctggtgtgtttactaaaatgagagcctctgctggaggcatcggtatccccagagattgccaggtccagaccttccccagacgtgcatatcagggacttcatggggaggtagcgatggctcagctggaccgtggcccctaagaccctggaccccagggccttgtggcttctacaggcagaggcaagttcctgtgcctgatcctgcccctgatcagggctcagcagggaggcaccccacccacactagaatttactcatagtgtttttctgctccaaagttttttgtatgcctttttcctatgattaaaataacagtaatagctaacacttctcagtcacttactgggtatgcaccaggctccattctgaggtacgtgtgcgtgtgtcagatgtatatacacgctatataaacatatatataatttaatgtgtttaatgcttataaactaccctatgagagtaggcactgttattatccccatttcaaccattgaagttgaccactgaggtcacagtaagtagcagagctgggcttcagatgaagatactgtagtttagaggctgggctcataacctcttctgctgtatggttatcatacctataattaataagtacttgaatcatttaatcacatggctgcatgcagctgagaaacctccattaacacagtacaggttcatttctctctgatataccagtctggatggaggcagactaggattctgcagtcttcagtgacccagactccttgctgtttgttgtgccattgctaggtttttccctttatcctcatagcccaagacagctgctgaagattcagccatcacatccacactccaggcaacaggagagaagaataaatcaagaaggaatatttcttctctttaaggacacttttttttttttttttttgagatggagtcttactctgtcacccagactggagtccagtggcatgatctcggctcactgcgacctccacctcccaggttcaagcgattcttttgcctccgcctaccaagtagctgggattacaggcgcccgccaccacgcccggctaatttttgtatttttagtagagatggggtttcaccatgttggccaggttggtctcgaactcctgacctcaagtgttggcttcccaaagtgctgggattataggtgtaagccaccacgcccagcctcgttttggttttggtatctgttgttgctgctgattctcgctcataatgtcgtttccttttgtgcctggcttatctctgtctgtgtcctagtcattatacttgaaaagttatttgtaggaatttcagggctaggatgagcatattttcctacagagaggattgcctttgcttctgcctgggggcattaccaagtcctaggtttccttgcaccaggttcagggcttgagctgcccttcgtgactccttatcccacgagtggccttgcatacttcgccctgcatacctgttgtgcaactcctgggaatgggtaggccacctggttccttccttctcaggggtggaggcttgcaccttgtggggtcttagtttcctatagggtaggtctctggttacctcatatgttgtatgtgccctgggctagcatttttttttttttttttgagacagggtctcactctgttgcccaggctggagtgcagtggcatgatcgtggttcactgcagcctcgacctcctgggctcaggtgattctcccacctcagcctcctgagtagctgggaatataggcatggtgcgtgctgccatgcctggctaatttttgtattttttgtagaaactgtgtgttgcccaggctggtctcaaactcctgggctcaagcaatccacctacctcagcctcccagcgtgctggggttacaggtgtgagccaccgcgcccagcctaggccagcatttttgtcacccaccaaaacacctagcagatgtcctcggacacatgaagaagcttatagggctcctttacttattctttttttttttttcccctagacctgcaaatccaagatcctttacttctttttttttttttccttgagatggactttttgctcttgttgcccaggctggagtgccatggcacgatctcggttcactgcaacctccttctcctgggttcaagcgattctcctgccccagcttcccgaatagctgggattacaggcatgcaccaccactcctggctaatttttgtatttttagtagagatggggtttcaccatgttggccaggctggtcttgaactcctgacctcaggtgatccacccacctcggcctcccaaagtgctgggattacaggcttgagccaccgcgcccggccgatcctttactactttaggattcccactttcccttcagtttttgcctgaaggtttggtaacctacagtcgtgtccattcttcagagctgtctatttatatatattcatatgtaaacttgataaaaattacatgcatgagaacaaatacgagaatacgtgagcagcatatattctcattctatcaatatgtataattacaaatataaaatatattgatattttcttagtgtattaattttatcaagcttttccaattttttccagtgagagggttggtctgaataattaagcccactgttactaaaattggaactaacgtatcacttactatctgcttctccaaaaattctccaaaagttcagaaatgttgctctttctaagcttctgtgccttcggttcttttccttttcttttttaaaaaatttaattaattaattgattaatttttttgggacaagctctctatctcccaggctggagtgcagtggcgcaatcacgtctcactgcagccttgaccgtcagggctcaagtgactctctcacctcagtcccccaagtagctgggactacaggcatgggccaccatgcccagctaatttttatattttttgtagagacgggatttcatcatgttgcccaggctggtctcaaacttttgagctcaagcaatccgcctgcctcagcttcccaaagtgctgggattacaagcrtgagctgctacacctgacccaattatactttttttttttttttttttttttgagatggagtctcactctgttgcaaggctggagggcagtggcgcaatctcggctcactgcaacctacgcctcccgggttcaagtgattctcctgcctcagcctcccaagtagatgggactagaggcacgcaccaccaggcccagttaatttttgtatttttagtagagacagggtttcaccatgttggccacgatgatctcgatttcttgacctcgtgatttgcccacttcagcctcccaaagttacaggcatgagccactgtgcctggcctctatacttcttaagttattttaaaatgtgtaattaaattactattgactagagttgccgtgttttgctaccaaatactagatctcattcattctttttttttttgagatggagtctcgctctgtygcccwggctggagtgcagtggcgcgatcttggctcactgcaacctctgcctcctgggttcacaccattctcctgcctcagcctccggagtagctgggactacaggcgcccgccaccatgcccagctaatttttttgtattttttagtagagacagggtttcaccatgttrgccaggatggtctcaatctcctgacctcgtgatccgcccgccttggcctcccaaagtgctgggattacaggcatgagccgccgcgcccgtcctcgttcattctattttttgtagccattaaccatccccggttctgtgcttttgaagcgctaggattccagattctttcttttaaaaattttatgtttattattttttctttatttcttttttcttttaattcatccatctgcacactgaaggggttccagattcttagtctcctctcgggggatcccagggggctggatggcaggtttcccagtctgagtcaagagtcagcccctgcagccctgtggtcaccaggagctcctgcaggatttagagtcaagggtctgcatgcagaccagggcagtgccagctacccccacacactggcaaacggtggcatctgggctccctccccagatgtggtctttagggacatcttatctccttgccagccctgtgactaccttctcagggcctccctgacttggtcactagccccaggtcaggcgccagcatgtgctaagtcagaaggaagtcaggcgggtctatggcggagagccaaggcttggggactcaccaccttgctgcttctctcctcaggatcttcatcatctgggccatcagcagttggttccgccgagggccggcccctcaggaccaggcgggccccggaggagcyccacgcgtcgccagccgcaacctgttccccaaagacactttaatggtaactgccgggtggtagggcagacttgggaggtgatggggtgtggaggggtggaatgtggaggagtgatgtcagcagtcgggacagaccaggtccttgctcactggcaggtctaggaaaacaggtccagggttgaggaactctgggcccatccccaacacgtgagacctctgtcacctgggtccatccccagcacataaaacctgtgtcacccaaaagaaaaagcaaattcatttggttaaaataggttaaatcagggtctttggatgttatatttcaaaagtatgttcagcctttcagggttgcagagggagatgtgcaagggagagagtgtgagaggtggggagggcagggagccagcagaggctgacaggaggtgggcccggaaggagaggagacctgcacttccacagtgggcttgggcacaggcagggcagggcttcaggagcctccagagcaaaagcatttagatctgtcagtctaggcttttctgagcaaacatggccattggggcttgagaaaggaggaagttcttgttgggtcacagtgggtttttttttgttttttttttttttttgagatggagtctcactctgtcgcccaggctagagtgcagtggcataatcttagctcactgcaacctctgcctyccgggctccagtgatcctcctgcctcagcctcacgactagctgggattacaggcatgtgccaccacgtccagctaattttttgtatttttagtagagatggggttttacctttttggctacgctggtctcgaactcctgacctcaagtggtctacccgccttggcctcccaacgtgctgggatcacaggcatgagccaccgtgcccggtggctcacagtgcttttgtagctctggactgcttcgtccataagcctgcagagctctgaccaggaaggcccagcagccatgagggcaggagatcattcagggagctcctgccccttcctacccctaaattctaattggcaggctggccagtctccaagtgttctttgttcgttgacttcacaggctcagaccaggacaaacatggtggtatgagaaaagagaaaatatgtcctctctgctgctcttcctctctcctctcccctgtcctccataattactgttcccctgagtgtgctgaccgctgccatagctctttagccagcctgcagaggctctgaagagcaggcctgagctctgttcccttcctgtcccaacagaacctgcatgtgtacatctcagagcacgagcactttacagacttcaacgccacgtcggcactcttctgggaacagcacgatcttgtgtatggcgactggactagcggcgagaactcagacggctgctacgagcactttgctgagctcgatatcccacaggtgggggcagctctcggtttctggccccatggctgcttgactggcactgaaggaccttttcctccagtccgctccttgctgagagcatgtggagttygggctccaggcttggcccttccctgggctcacatggtctgtgaccacaagccagtccctgagatctctgggcttcactttcccctacctgaaaaaggtagataggggtggaattggcctgggaccctcccagctacctctaaggttgtgcagtcctccactttaaactggtgaaagattagtaattgtccttggggatgtttgcctatcaccagtttatcaggcagccccgtttcaaaataatattagttaatgttgattgagctaagtgcagggtactaagctaggctgactcatggaaatttcccggcaaccctgtgaagcaggaactgttattattctcatttaacatgtgaggaaactgagacagagagaaggaaagtgatttacccaaggccacatcgcatgagagattcagactcaggctctacggctgtggactctcgcagccctaggctcaaatccaacctcctccaggaagccctccctgactcacagagcactcaggcttggttaagcaccctctctgggttctcacacctgctgggcttccccatcccagcccattctggggcctcattgggactcctgtatgggactgtgagccttgtgataataaggctggggctgcctagatcacttccatgtccccagcactgcccaacgtggggctgggtgcagaatcagcaagtattgaacaagtaaaagggacatctctctttggggccttcttcggctgagtccaagacagctgccctcattcctttctccccagcaggccttctcagctttggggtggagggcacatttctgttctatttctgtctgggtagctagaagcagaatgtggacacagtcattctggtttttttttttgttttttgtttttttttgagacagcgtctcgctctgtcacccagtctggagggcagtggcgcaaccttggctcactgcaacttcacctcccaggttcaagcgattctcatgtgccagcctcctgagtagctgggactaaggcacacatgatcacacccagctaatttttttattttttagtagagacaaggtttcactatgttggccaggttggccttgaactcctgacctcaagtgatccacctaccttggtctcccaaagtgctgggattacaggcgtgagacaccgcgtccagccatcattcttttctttttgagatggggtcttgctctgttgcctaggctgaagtgcagtggtgcaattacagctcactgcagcctcaacctcctgggctcaagcaatcttttcacctcagcctcccaagtagctgggacaacaggcatgcaccaccatgcccagctaattttttgtagagatggggtctcaacatgtttcccaggctggtctcaaactcctctgctcaagcgatcctctcacctcagcctctcaaagtgctggaattacaggcatgaaccaccccacctggctggactttctgacctgcactgagaggtgactcccacagagwcctcaagcccagcccccaggccttgccacgagatccaaggaaggaccagggcctggcaggcccagcagggggatctgcttccaagggcttggatctaagtcgaagcttcagggtggggtccaagtggacttaaaaggcaggagagctgggcacagtggcatgtgcctgtaggcacagctactcaggaggctgaggtgggagaatggccagagcccaggagtttaagactgtagtgtgccatgatcgcaactgcaaatagccagtgcactccagcctgggcaacacaggaagaccccatctctaaaaaagatagggagagtgaggagaacacaatgtggccaactgaattcgagctctgcacaaggatcagagaggttcagtgctcgcctttgtctccacccagtgcccctggacaacttgcctcccttcttgaagcctcagtttcctcatctggatcaagtgagaatagtcccccttccctgggaggcaaggagacttgatgagataatgaggaagacttgggcagagaggggccagctggaggtagcagggagtagcacccaggagcccacagactgggtttccatctgcgtacttgccacacactatgtgaccccttggcatgagccccgtttgcctcatctgcaaaatggggtggtaacatgacccattgcataaggttgacatgttatatgtgtgttaactcgttagattaggaagctgttgtctgaagtgcccagggcagggtctggcccatagtaggagctccatgtcggtcagctgcttcttcctgttgagtgagcttaacgagagctcgttgactgagctgtgtgccagtgctccaggtagtccctgcagtggtgccctcgggtcagtgctgtgggaacttcgcatcctctaggtggggccctgaggctcagagagaagctgagctcacacggccatggcaggtagagcgggcgtctgagtctgtctgactccagcatttacctctctgccacccagctacatgccccaccctgagtactcagtaaatggccagagagttgagggggaggaaactgctgcagatgggtgccaggcagggctttaacgtttccctcaccccagttgcccagcctgcccacctgaccttccgtcttttgcagagcgtccagcagaacggctccatctacatccacgtttacttcaccaagagtggcttccacccagacccccggcagaaggccctgtaccgccggcttgccacagtccacatgtcccggagtaagtcgctcccctgcagccaggacccactgtccaggaggccagcatcctgggagcccccaggctaatgtggcggacaaatcccaagtccaggagggcaggcaggaagcctgtgctcaaagagggtgggattggcagggcaggctcaagccccacccagcctgaaagagccctgtggacactaagcagggatacccacggaggaagggagacccacggaggctcagggaccagagagaaattggccagaaaaagcagctggagacagggactcttggagaggaggagacgtccttcaccaagggggaagggccagggttgacttttgcacagtaggggcctgatagaagtagacactcaaaaataatttgtgggctgggtgcagtggttcatgcctgtaatcctagcactttgggagacaaggtgggcagattgcttgagcccaggagtttgagaccagcctgggaaacatgacaaaaccctgtctctaccaaaaaagacacaaaaactagctgggcgtgtgcctgtagtcccagctgctcaggaggctgaggtgggaggatcgcttgagcccaggaggtggaggttgcagtgagccagaatcacaccactgcactccagcctgggtgacagaccgagaacctgtctcaaaaagatagatagaggccgggcacagtggctcacgcctgtaatcccaggactttgggaggccgaggcgggtgaatcacaaggtcaagagatagagaccatcctggccaacacggtgaaaccccgtctctactaaaaatacaaaaattagctgggtgtagtagcatgctcctgtagtcccagctacttgggaggctgaggcaggagaatcgcttgaatccaggaggcggaggttgcattgagctgagatcacgccattgcactccagcctggtgacacagcaagactccgtctccgtctcaaaaaaaaaaaaaaatagataaaattcaaagaacagtgtgggcaacataatgagacttcgttgctacaaaaattaatagccaggtatggtggtgagcacctgtggttccagctacatgggaggctgaggtgggaggatcgcttgaacctgggaggtcaaggatgcagtgagctgtgattgcactacagctttccagcctgggcgacagagcaagtccacgtctctgaaaaaacaatagtaataaaaaataagactaccacttctactcccatgataactcattaatccattaaaccactaatccatgaatgggttaatcagttcctgaggggagggtcctcatgacccagtcacctcttaaaagcctcatctctcagtactggcacattggggattaagtttcactgggagtggggagtactagagtacatcagtagtcccagctacttgggaggctgaggtgggagaatcagcatgagttttggccaggacaaacattcaaaccatagcattgtccgtcctcttgttttcgagargttaataattgttgtcatctttctgcttgcctggctctttttttttttttttttgagacagggtctcactatgtcgcccaggctggagtgcagtggactatctcagctcaccacaatttccacctcccaagttcaagcgattctcccaccttagcctccaaaatagctgggactacaggcacacgccactacgcccggctagtttttgtatttttagtagagacggggtttcgccatgttggccaggctggtctcaaactcctgacctcaagtgatcgtctgcctcggcctcccaaagtgctgggattacaggtgtgagctgccacacccagccttgcttggttctctgtgagctttttccctgagtcctctgtctcctgatgggcagccgtagaaatctcttgctgtacctgtttgagcggagctggagaatggcttcctcagaaagccccccattcttctaacgggagttctgtgtactccacctagctttcactttattgaggactattccagacattccctgtggatttggttaagatccatctggctggttttgggtggcgcagcaacagacagaattctatttgtatgagttaggtcttacctacttcttttagtacaaaaatatcctaaaggatggtaatttttttttatcacctatactggatgaaatgaaaagttgactctatgtgggtccctagaaatgacttggaaaggtcttctggagttacttgagcccctttctgagtgagtgtgtctgmagaatgtgctgcgttggtatgtcccacccggctgacgtccatgtggtgagatctttggagaaccaggcagaagtggcttgagggggtgtgacctacagggttggtctcacagatgtttccctgcagggggatacgtcaggggtctgggctaaaatgcccgatgtttcagaggtcgctctgaaggtgacccaggtgggtggctcttcaccctattcttgtaccccgtttgacgatcacctaatcatcccgttgacccaaatcgatgccagtattttctgcagttttgtctttggtgagtgtgatccatgtcactgtgtggtgaggtttattcacagtcagtctggtctgtaaaatagaacctgcagacagtgaacctgaaaagcatactaggatcatccaggcctccctccccagccttggagctgggaccctcaaagcagggacatagaaggacttggagtgagccacccacaaactccagggtgaaggagagtgtgagttcagaaaagcccccttttggctggttgtggtggctcatgcctggaaacccagcactttgggaagccaaggcaagcagatcacttgaggtcaggacttcgagaccagcctggccaacatggtgaaaccctgtctctactaaaaatacaaaacttagctgggcatggtggcacatgcctgtaatcccagttactcgggaagctgaggtgggagaatcttttggaccccggaggcggagattgcagtgagccgagatcgtgccactgtactctagcctgggcgacagagcaagactccatctcaaaaaaaaaaaaaaaaaaagaaaagaaaagccccttttatccccaagaggccaataatcagtattctagagcagctccgtcccatggagataggatgtgagccagagaaggcattaaaatttttccaatagaaaaatactaaagagtaaaaaggtaaagagaggccaggcacggtggctcatgcctgtagtcccagcactttgggaggccaaagtcagaggatcgcttgagcccaggagtttgaggccagccctggcaacatagggagacctcatctctacaaaaaaaaattttattttattttatttattttatttcattttatttatttattattatttttttttgagatgragtcttgctctgttgcccaggctggagtgcagtggtgcagtctcggctcactgcaagctctgcctcccgggttcacgccattctcctgcctcagcctcctgagtagctgggactacaggcgcccgccaccacgcccggctaatggtttttttgtatttttagtagagaccaggtttcaccgtgttagccaggatggtcttgatctcctgacctcgtgatccacccgccttggcctcccaaagcactgggattacaggcatgagccagcgcgcctggcctattttattttatttttttttgagacagagtttcactcttgttgcccaggctggagtacagtggcatgatcttggctcgccacagcctccacctcccaggttcaagcaattctgcctcagcctcccaagtagctgggattacagtcatgtgtcaccacgcccagctaattttgtatttatagtagagatagggtttctccatgttggtcaggctggtctcgaactcccgacctcaggggacccacctgccttggcctcccaaagtgttgggattacaggcgtgagccaaaaaatttttttaaattagccagatatggtggtgcgcaacctgtagtgtcctccgactcaggaggctcaggtagaaggatcatttgagtccaggaggtcaaggctgcagtgaactgtgatcaggccactgcacttcagcctgagcaacaaagcgagaccctgtctcaaaaagaaatataaataaaataataaaaaggtaaggccagggccgtgatggctcacacctgtaatcccagcactttgggaggccaaggctagaggattgcttgagcctaggagttcgagaccagcctgggcaacatggcaaaaccccccctaataaaaatacaaaaattagccaggcatggtggcacatgcctgtaatcccagctactcgggagcctgaggtaggaggatcacccaagcccaggaggttgaggctgcagtgatcacaccactgcactctagcctggataacaaaaggagaccctgtctcacaaataaataaataaaaaggtaaagaaaaaccatgagattaatatcaataatagtttaattgagctcaacatattctcgtttcaacatatgatcagtataaaaagtgagatattttacatttttgtttccccttgtgtcagttttcagaatctagtgtgtgtgactgggcacggtggctcacatctgtaatcccagcactttgggaggttgaggcaggtggatcacttgaggccaggagtttgagaccagcctggccaacataatgaaaccccagctatactaaaaatacaaaaattaggcgggcatggtggctaacgcttgtaattccgtctactcgggaggctgaggcaggagaatcacttgaacccagaaggcagaggttgcagtgagctgaaatcgtgccactgcactctagtctgggcgacagagcgagactatgtcaaaaaaaaaaaaaagggtctagcgtgtgttttatatcatagcacttcttggtttggaccagccatatttgcagtgcccagtagctgcatgtggccagcaaccctgatactggatggtgcagctctagaagattttcctccaagaaaggggggctttttcctccccacaggagccaggtccatctggtctggatgcctccaagctgcagaatgtgttctttgcctgagccaaagcctctctcccctgtgcctccccctccaccagccagcgctgccctctggggctctcccttccctggacagtctctgtcaggtgtggacacgattggggcatgtccccctggaattttctccaagtcaacccttgagtgttggtttctccccctggacacaggaggaagatccccaatgatttaataatcatagaaatgatgaggattggccaggtggctcaagcctgtagtcccagcaatttgagaggccgaggcaggtggatcacttgaggttagaatttgagaccagcctggccaacatggttaaactccgtctctactaaaaatacaaaaattgctggtcatggtggtggatgcctgtaatcccggctactcgggaggctgaggcaggagaattgcttgaacctaggaggcagaggttacagtgagctgaagtcatgccactgctctctagcctgggcaacagagtgagactccatctcaaaaaaaaaaaaaaaaatgaggatgacgtttctgctaataagcagtaggccctgggccaagaagtggtgaggcttttcttccttctttagggaagtgacatcactcaccagcatcccttagcttgtaggattcagagccaagattgcccccagagcccccgctgttggccaggtctctttcccctttccctgtctctccctggccccaggggacaggatagagacttgagggagggcagactgagttttccttcatagcataaggaagagctgaaaagtccccgggctcagtggctcacgcctgtcatcccagcactttgggagactgaggtgggcagatcacgaggccaggagattgagaccagcctgggcaacatggtgacaccctgtctctactaaaaatacaaaattagccgggcgtggtggtacacgcctgtagtcccagctacccaggaggctgaggtgggagaatagctggaacctgggagtcggaggttgcagtgagccaagatcacaccactgcactgcagcttggatgacagagcgagactctgtctcaaaaaaaaaaaaaaaaaaaaaaaaaaaagaaaagaaaaaagaaaaatacttagcttcttttcgggccaggtgcggcagctcacacctgtaatcccagcactttgggaggccaaggtgggcagatcacgagatcaggagattgagacaatcctggctaacacagtgaaaccctgtctttactaaaaatacaaaaaattagcagagcctggtggcacacgcctgtaatcccagctacttgagaggctgaggcaggagaattgcttgaacccaggaggcggaggttgcagtgagccgagattgtgcyactgcactccagcctgggtgacagagcgagactctgtctccagaaaaaaaacagaaacgtccccaggccagggcagaggttgggagatggagcgtgggcacgcacaagccccttcctccccggcagcatttgggacaacatggcagggggcctgtggccaactgggcctctgcgagaggaagtgaggccaactcctggctggggattcacagcctcaaagtgtttctcatcttggtttctcatgttggtggcttcaggccttttttggaaccgtctgctgcctctttatagtcatgtattcaactggtcatcaccgagcctgtgcaggcgccccatgtgtrttcaaacaggccctgcccctacccgcatttccgcacagagtttgcagactggttgcagggacagacagcaggcaggtaaaccactggctaagtggttttggatagtggtgaaatgttgtgaaggaaacaagctggcaggagaatgactgcataggctcattcagtggggtggccagggaagccctgtggaagaaggacattctgccagggacttgaatgccacggaggagccaggccacgaagattgtgtcagggcatgggttcctgggacacggggcagcacgcctgaaggccccgggttggcatgtttgagaagtggaaggtggtgagggttgagaggtcaccggggctacggtgagtgtctggggttccaaagctgcgggatggccatgatcagtcacttgtttttatttatttgtttgtttgttttctttttctttttgaaacggagtttcgctcttgttgcccaggctggagtgcaacagtgcgatctcagcttcctgtaacctccacctccctagttcaagcgattctcctgcctcagccttccgagtagctgggattacaggcacccgccaccacatccggctgatttttgtatttttattagagacggggggtttcaccatgctggccaggctggtctctaactcctgacctcaggggatctgcccgccccagcctcccaaagtgctgggattacagtgccctactgagctggggtttctgcctggggcatttggtgatggtggcgtccccatgatcatgaggaactgggattcgttgagatttggggaggcagttctggcattccaggtcacattgatctcagcaggtgagtgcaaggtggatgccaggagaccgtgagccgttgctggtgggcaggggtccgggctctggaggctgcaggtgccrgcaggtctcacgtcccctcctttcccacctcccaaccacagtgatcaacaaatacaagcgcagacgatttcagaaaaccaagaacctgctgacaggagagacagaagcggacccagaaatgatcaaggtaaaygggcagggttgtcagggcctatagggaccaagccaggccattcacagctcatcccagaccactggggctgtcatctgtcaccaccactgaaccaccatgccggctcggtcatgccacctcccctccctgagcactgggctcctcctctgggaaatggggtcaggaggcagctgtctctcagggagtgaggaggatcccagacaaggttacctgagcctcttgccagcctgggaggggtctacatcacagtcccattgtcacatgaggacacttgctcagtctcagccggaagtggcaggccagggactctcacccacacagccaggccccagagcccaagctcagcctggctccaagcacacacacgagaatatggctttagtaggaactgcaggattcatagttgctgtcactcccrgtgggctggggagccgggcagttaatctgtggttaacctgcagtgggcactaagagacttcctctctctgcgggtggtcctgtgttgggggggtggtccctgctcatggagctgaggccaccgtgcaagagtgtgtggagcctgctgtcatgaggctgggcttcgcagcctggcctaggatgccagccctgcctctacctctacctcggttttctacatgtggggtgggaggatcctgtcggtggccggaagggtcctgggtggcggaatctctaagcctagggaggagagccttctgccagcagttgctgtggtggctgatattctgctgccagggttgtcaggggagatggctcatgcctgttttcccagcattttgggaggccgaagcagaaggatcacttgagcccggaagttcaagatcagcccaggcagcatagtgagaccccatctcttccaaaaaagagaaaaaagaaagaaagaaaagaagctgtccatggtggctcacgcctctaatcccagcactttgggaggccgaggtgggaggatcgtgcttgagcccaggaattcgagaccagcttgggcagcatagtgagaccccatctcagaaaaaaaagaaagcaaagattaagattttctcgggaaccctggggaggaagtgtacagagagtgatagtccccgagcacttccacctgcctctgaggtccttccccccatgttgcctcagagggctgaggactatgggcctgtggaggtgatctcccattggcaccccaacatcaccatcaacatcgtggacgaccacacgccgtgggtgaagggcagtgtgccccctcccctggatcaatgtaagctccccagccctgccagctgcctgcagagcctttgagagggtgctcggggtccatctccttgtcttctcctggccctgtccccctgagagagctttccagggctccaccctcccaagctcccaccctgtcctatccccttcccatgtcctctccctctcccacaccaccacccctggggaccccaggactgacttctacacgccagcatcggtccgcaatcaagtgccatccagcccacaaactgttttcaaaaaatgtcttatcacttgccagcttttgaaattgaggcagtatcacttaaaagccacaatttctggcttattttataaaactgggttacatggtcacccacagggcagccgtgggctggagctgagccacagctgcccccttcagtggggacctgcctgccctttgcctcagtcccctctgctgaggtcaaggcrccctttagctcctcatggtgtggcctagaaatgtcccctgtcctccagtctctgtagaggggccctgttgggtctctccagacatctgaggcctgcgggtaccctggcctcctgcccgggccaaatggtgcccctgccccacgtgctgcagatgtgaagttcgacgccgtgagcggtgactactatcccatcatctacttcaatgactactggaacctgcagaaggactactaccccatcaacgagagcctggccagcctgccgctccgcgtctccttctgcccactctcgctttggcgctggcagctctatgctgcccagagcaccaagtcgccctggaacttcctgggygatgagttgtacgagcagtcagatgaggagcaggactcggtgaaggtgagtgcggccggtgtgggcgggacttcccggtgccttcctgggcgcaagaggccaagaggaagtgtgccaggcctgggctgtgggacctcccgcctggtgctcctctgcccacagtttcacaacctcccaggtcccttctccacagtgaaaggaagtgggcacccagccctccagccctagatgactgggggtcctctccccaggctgttctgttggaccctttgggtccagacctgtcccttcctccttctgtcccagaccttgtgtccctggccctggctccaactctgtgtctctgccatctcactgggtcctgaaatgtcagcctgtgtctgtggcgtgaggctcggctttgcctcctgggctgtcgtcactgttgggtctctgctcctggctcccagtgtcccttcacccactccccgcagcactcccttggcctctgcctcttcccctagtgccatctccccgtctcttctgtctttgtgagtcrccctcctctctctccccatctgcccatctctgacccagtctcctcctggctggcccaccttcagcctccctctacaggcggccccaggggcagccctcgggacaaaagctagtgaaggtgctcctgggtggggacaggctgtgctcacatgtgtcccctgcaggtggccctgctggagaccaacccctacctgctggcgctcaccatcatcgtgtctatcgttcacagtgtcttcgagttcctggccttcaagaatggtaggaacaggaccccagggctagtgagaggctgtgcagggtgggggacaggacctgcccccttcctcctcccctccctccccacatgtcctccccctgcctggggtctctcagccccactctccagaggcctagtgagctggggaggggcagtggccccaaaactcccaacccagaaattcccacccaccgggtgtggagctgagggaggggctggcccgctggtggggcagaggccaggccaatactgccaggaagcagggctggggaactccagagccaagagcagggaagccccggagctgctcccgccaccctgcccggcaggctgcctgctgcgggaggccgcttagggctgagtggacggggcctgcccaagtgggaaggaggagcactgtcccccaaaggtccctaggttctaaggctgaccatactgatggccagcgtttgaggagaagcagccacatgccaggcactgtcctgggtaccctccccagtagctccttgagccctrtgggagccagaggctcagggatgtcacttgcccagtcacacggttcctaaggggcagatggttccagccccaactctcatcttctaggccctgcaggccacttcttccttgcccagagcaccccagtctgaaggagtggcctgcggccctgtagctcccgcaggcggcaagaggaatgagtagtagtattcctggtattaagatgctattgccggcctggtggtggctctcgcctgtaatcccagcactttgggaggccaaggtgggaggatcacctaagccccggagtttgagaccagcctgggcaacaaagcgagattcgtttctacacaattttttttaagaattagctgggcatggcagcgygtgcctatggtctcagctactcgggaggcttgggcctgaaaggtcaaggctgccgtgagccatgatcacaccactgaactccatcctaggcaacagagtgacaccctgttccaaaaaaaaggacgctcttgccattattgagaactaccatctggaagaatgcagtgtcatacgggcacaggagctggtgccgaccccagccagccatctaccagctgtcgctgggagacgggacccttctgcctaggagctggcttggctggggtccagtgagaaatgaggcacaagaaggctgtcctccccagtgtcatgcagcagggggcgcaggcctcacttggcaccagtgctgtgtggcctccctggtctaaggagaggcttgggcccaactgctcccacgagaacccaccagaaccctgtctccagacccattcttctcagttgggacaggggtcattctgatgggcaggggtgggtggggtgaggctatggagtgtgccagagctctgggatgtgggggagctctgggatgtgggggagctctgggatggggtagggtgcacatggaccagaattcacagccctcactccctgagtgcagagctggccctgactctgcaggactgcagacctggctccaccactgtgctacagacgtggtggctcagcctcctgtggctgcggttagatgctcagccgggcggggtcaagagaggggtgtccgtggtgagaccagggctcagagaggagcatgctgacatggatccttggcagcatctaggcggagcactggaaggagctccagactggagcccagggcccttttcagtttcctgagcatggctgtgagccagttccttcccggtgtcagggcaggggcctggaggaggtggtcttgaagtgcatgccacagatcttccttcccagggagggcgagctggcaccatggtgtggcacagaccccgcgtcccttcagattctgccatgccaggctgtttggcctcagggaagcagcttccctgaccagtccttagcacctggcacgtggtgagccctgtccatggcaccagtcaccgtcaccatcagtcaagggactgcaccttggggtgctgggtgctgacgtcctatgggagggctccaggggtgccgcctgtctggtgctctgggggtcacccaatgaatatgagagccttcctgggagagaggggtctcgttcagcacccctcctgaggacccagccccaccccagggtgtgaggatgcaggccaagggggcctgagggagctgcagtagggtctcagcacctcctcagcctcctggttcccccctaccccctgcgcacagatatccagttctggaacagccggcagtccctggagggcctgtccgtgcgctccgtcttcttcggcgttttccagtcattcgtggtcctcctctacatcctggacaacgagaccaacttcgtggtccaggtcagcgtcttcattggggtcctcatcgacctctggaagatcaccaaggtcatggacgtccgggtaaggctggggcgccatgctgtctcgggagctgcaggggttgggagggggtagtgtggcccagctggaccctggagctggcccccgggggattcccagcaagtgcctcactcccaggactgaggggattttctcaccaggggattttttgggtcacacatggggcaggggaactgggaacggtggggaagggcaggggctggttctggcttgtggggtgggagccagcgtagcaactgaccatggcacccacctcatccacagctggaccgagagcacagggtggcaggaatcttcccccgcctatccttcaaggacaagtccacgtatatcgagtcctcgaccaaagtgtatgatgatgtgagtgtcctgcacagtgggcccctgggggtggtctccaggtacccacgtatccctgaggcacccggggccggccatctgtctgccggacccatgctttacagcctgtgccacatcctctgtgtcccccatctgccataactgcttccctgggcgagtccggagtccccagggctacctggaaattccccctgcccggcctgccagaccaggtgtggtgggtgagggcggggagcagggctgccaggcagggctgaggagctggctgacagccccaccctgtggccccacagatggcattccggtacctgtcctggatcctcttcccgctcctgggctgctatgccgtctacagtcttctgtacctggagcacaagggctggtactcctgggtgctcagcatgctctacggcttcctgctgaccttcggtgagcggtccggccgccccaggagagagcaggccccatgctgcgcagggctcacagccccagtgtaggagacagacccatccccagacagggacaacctagggtgggcagagctgggatatagggaggcccgagggcacacatggccccatctggggtcagagaggacttcagggaggacatgaacagtacgcttcagtcctcattctcagggggcctttgtgtcttgggaacaagtaaacaagtagggccaggtgcagtggctcacacctgttatcccaatgctttgggaggctgaggcaggaggatcacttgagcccaggaattcgtgaccagcctgggcaacttggcaagacccgatctctacaaaaaaacacagaaattattggggagtggtggtgcgtgcctgtagtcccagctacctgggaggctgaggtgggaggatcccttgagtccaggaggttgaagctgcagtgagccatgattacgccactgcactccagcctgggtgacagagtgagaccctgtctcaaaaaacaaaagaccgggtgaatcacagccaatagtgagtactgtgaagggcagagtggtgggaggatgcacattaataggggtccgggggcccctctgaggacaggacatttaaacagaggcctcagatatccagggagagagctgtgcggatgtgacagaaggccccaccagtgcagaggccgctggtagagtgtgcccaggtataggaagtggtagagtgtgcccaggtgtaggaagtggtgagggggctggtatggccagtgcagagtgcacaggggagaggtgggagaggccatccctctgctcatgggtgctctcactgcaggcttcatcaccatgacgccccagctcttcatcaactacaagctcaagtctgtggcccaccttccctggcgcatgctcacctacaaggccctcaacacattcatcgacgacctgttcgcctttgtcatcaagatgcccgttatgtaccggatcggctgcctgcgggacggtgaggcccggtgggcaggtgggagctcccaccggaacagggccctgaggcagtctttagggcccaggcctgagggggtgccacggccccagatggggtgctcagtctgagggggctcggccccgcccttgcatcacgccctctccacccaggcccacctggctgtggacgggccagcccgacctcacactgcctcccacccctctccagatgtggttttcttcatctacctctaccaacggtggatctaccgcgtcgaccccacccgagtcaacgagtttggcatgagtggagaagaccccacagctgccgcccccgtggccgaggttcccacagcagcaggggccctcacgcccacacctgcacccaccacgaccaccgccaccagggaggaggcctccacgtccctgcccaccaagcccacccagggggccagctctgccagcgagccccaggaagcccctccaaagccagcagaggacaagaaaaaggattagtcgagactggtcctcacctgctccggctcctggcgaccactacccctgcgtcccggccccctcgcctcccctccctgtcgccctttccctggacagatcaggccggggcggtgggaggcccgcctcaggtcagggcccagcgtgtgatgtaggggccggggcaggccagggtttgtttgtggaggcgctgtctgtccctctgtccctctgtgtttccagccatctcgccctgccagcccagcaccactgggaatcatggtgaagctgatgcagcgttgccgagggggtgggttgggcgggggtggggccgggcccccctacgggatgcccacggccgttcatcatcttgtccctcgtccccctaccacactccccctcctagaccgccgccctttaacacagtctggatttaataaattcatatgggtgtttaacttaaactcagcactgcccctcctcctcgtgccttccttcctctgttgccttggasaacagcttcmagcagggatgaggtggctttcctgggtctgggagagtgacctgacasggtacgggacstgtaaaggtggggattgtgaccttgtgtcaagarccatacctggscgggcgacagtgagctcacacctawaatcccaacactttgggaggctgaagtggatggatcacttgaggtcaggagtttgggaccagtctggccaacatagtgaaaccctgtctctactaaaaataccaaaattaattgggaatgctggcaggcacctgtaatcacagatactcgagaggctgaggcaggagaatcatttgaactcgggaggcggaggctgcagtgagcccagatcacacactgcactccagcctggacaacacagcaagattccatctcaaaaaaaaaaaaaaaagccatacccgccaggccaggcctcttcctcacttctcgccctcccaccagccctctgagatttcattaactggcctcatttcagattgctggggaagctgcttgcagggagctcgctgccctataccctttcctgccagctgcccctgctgggtgcaggctggagcctgccatgtgcccgctgaatgtctcctaacccgacaccaccaggcagggccaagtacagctttcagccgggtcgccatgagcacctgccaccctgaggcctcagcacagcagttggggcacgctaaatgtgtgccattggctttttgcgctgacacccactcccaattttggggagcatgggggtgaaggctcagcctgcctgagtggcacctggttggctggctgtagcactctgtgagtgttggggtgtcatatcacatccccggggctgcctgtgctgacaacagaggtggcatgagttggatttcccatcccagcccctggtgctgggactcttcgcccactggataggtgagctgagcgaggcctctgtgttctgagggctggggaccctacattcccaggtttactgttttggggggtggtctcagcaacacttctgggatagggggcccaacgctgaggaccacaccaggttccttcaggctccagctgccaccccatattgcagagccagtcaggggatccatgaggccccagggagacgatggcaccctcggagccccataccacaggtccacaggccatggcagtctcccatccctcagggcagccatgggtctccattacccgccccccaactctataccattccatggatccccggtgcccttggaggaaccccagcctctgcaccatggcctgactgacaggctcctaggaaccccggaggtacagggctctgcagccccttgagactggtgggctctccagccacctggacttcctggcctcgtcacccctggttcttcctcctctcacagctccacgcccaagcctttgacaaggcccatcagctacccccacaactccctgggggtctcacctcttcattgggaccacctgctccacctgctccatgcccctccttaccctgtggtgttcttgctcagtgttctgtctggtcccctgtcccggtcctgccctccccacatcccattcacactctagctagcagctagaggaaactcttttttttctttgagacagaatcttgctctgttgcccaggctgtagtgtagtggtaggatctcagctcactgcaacctctgcctcctgggttcaagtgattctcctgtctcagcctcctgagtagctaggattacagacatgcaccaccacgcttggctaattttttgtatttttaatagagacgggatttcgccatgttggccaggctggtctcgacctcaagcaatctgcccacctcagcctcccaaagtgctgggattacagacatgaaccaccctgcccggcccagctagaggaaactttatagtttattctactaaagcacaaacctgaccctgcccagcccttgctcagaacctactgtgggtgcacagtgacctcaggagaaagcccaggctccttactggggactgagaccttggtgatggggacacttattaacccctgcatccagcctggtcttccccctacctggatcctgcccccaggcacacaacccctgtccacttctttttttctttgagagagtcttgcgttgtcccccaggctggagtgcagtggcacaatcacagccctgcagccttgacctgctggctcaagcgatcctcctgcctcagcctcccaactacctaggaccacaggcaagtgccactacgcctgcgtaattatttatttatttatttagtatttttatttattattattattttttgagatggagtctcactcttgttgcccaggctggagtgcagtggcacgatcttggctcactgcaacctccacctcccgggttcaagcgattcttctgcctcagcctcctgagtagctgggattacaggcacccaccatcacacccggctaatgtttgtatttttagtagagacagggtttcaccatcttggccagtctggtctcgaactcctgacattgtgatccacctgcctcggcctcccaaagtgctgggattacaagtgtgagccacagcacctggccgcctgcgtaatttttaaattttttgtagagttggggtctctcgatgttgccaaagctggtttcaaactcctggcctcaagcagtcctcccagctgggcctcccaaagtgctgggattacaggcctgagccatcacagctggcttatcccttctttatcttacccatgtgtcctccaagctgtggctccaatgctcactcctgtaggaagccctccctgactgccaagttctctggggtctctcatggcagccctgcccactgtgagtcatcactggggacaggttggtctcttccactggatggagccccgtgaggacatagccagacctgtcttgatcactgctgtgtccccagcatagggccaaacacagagaagccacgccaggaatatttaatgagtgcatgttgaacaaccccaacattcactttcccagacacatgaacacatccagaagtgtggacctcggtggggctcatattcagacactggagactgtgacaagcagtcaacaaatgtaacagctgaaccctgcccctgggtagtgccgtgtgctggggtgttttgtgtatacagccaggaccaagacagacccagacctgccgtcatggggctcacagcccagcagaaatcctgagcactgaggatatctgacatgtcctttttaatttttatttttatttatttacttttttttttttttttgagatggagtctcgctctgttgctcaggctggagtgcagtggcacgatctcggctcactgcagccttcgcctgtcgagttcaagcaattctcctgtctcagcctcctgagtagctgggactacaggcacctgctaccaagcccagctaacttttgtatttttagtagagacagagtttcacatttcaccatattggtcaggctggtctcgaactcctgacctcaagtgatctgcctgcctcggcctcccacagtgctgagattacaggcatgagccacggcgcctggctatcctttatttatttatttatttatttattgagacaaagtcttgctctgtcgcccaggctggagtgcagtggcgcgatctcggctcactgtaagctctgcctcccaggttcaagcaattcttctacctcagcctcctgaatagctgggattacaggagtgcgccaccacgtccagctaatttttgtatttttagtagagatggtattttaccatgttgatcaggctggtctcaaactcctgacctcatgatccacccgcctcagcctcacaaagtgctgggattacagacgtgagccactgtgcctggcccctttttatttatttgtgttctttttgagatggagtcactgtcacccaggctggagtgagtgcagtggcacgatctcacttcactgcaacctccgcctcctgggttcaagtgattctcctgcctcagcctcctgaatagctgggattataggtgcccgccaccacaccagctaatttttgtatttttagtagacatggggtttcaccatgttggccaggctggtcttgaactcctgacctcaggtgatctgcctgcctcagcctcccaaagtgttgggattacaggcatgagccaccgtgcctggccctgacatgtccttttagtcattcagcaaactttttttttttttttttttttttgagacagtctcactctgtcacctaggctggagtgcagtggcgtgatctcagctcactgcagcctccacttcctgggttcaagtgatcgtcctgcctcagcctccctagtagctgggactacaggcacatgccaccacacccagttagttttgtatttttagtagagacggggtttcaccacgttggccaggctggtcttgaactcctgacctcaggtgatccgcctgccttggcctcccaaagtgctgggattacaggcatgagccactgcacccagcctcaacaaacatttttgaggcctggcattggcaagaggcagagaggaatcaggagagcttctggtcctataacaattggagctgctatttgtcatccttatcataagccaagcactagtgtaagtgctgcatgtggttggcttcatccattacatttaatattattcagtgtcctcgtcaccttactggtccatcactctgccctcatctctacccctttcctgtcagtcactctgcaccagccttcttgctattccttaagcatgccatgcatgttcctaccacagggcctttgcacgtgctagcccctgtgctttgaacactctcccccagatatccacatgaatccctcacctcctttgactccctgttcaaatggcacctctcagaccctgatcttcctaacccaaactatcttccgaactccttctcgttatcctgctctatcctgtaatactgccatcaccatcagacataatatttgcttatctgttttccatctgtctcctcacttggatttccttgatggcaagggctttttgtctgctgtgtgccttgctatgtccctagcttttagagcagtgcctgacactgttacgctgtgtgtaataactgtaaattgaagagccaggcacagtggctcacgcctgtaatcccagcgctttgggaggttcgggcagaaggatcacttgaggctaggaggtcaagatcagcctgggcaacagcaaaatcccatgtcttaaataaaagaaagaagaccgggtgtggtggctcacgcctgtaatcccagcactttgggaggccaaggcaggcggatcacgaggtcaggagattgagaccatcctggctaacacggtgaaaccctgtctctactaaaactacaaaaaattagccaggcatggtggcgggcgcctgtagtcccagctactcgggaggctgaggagcagaatggcgtgaacccgggagtaggagcttgcagtgagccgagatcgcgccactgcactccagcctgggtggcagaggaagactccatctcaacaaaaaaaaaaaaagaaagaaatagggctgggcacagtggctcacgactgtaatcccagcactttgggaggccaagacaggcggatcacctgaggtcaggagttcaagaccagcctggacaacatggtgaaaccccatctctactaaaaaaaaaaaaaaaaaaagaaagaaagaaatgtagtcccagcactttgggaggctgaggtaggcagctcgcttgaatccaggagtttgagaccagcttgggcaacatggtgaaacctcatctctgctaaaaacacaaaaattaggccaggcatggtggcgcacacctgtggtcccagctcaccagctgtgtggcctcaggcaactgacttcatctctctgagcttcagtttcccgtctgtaaagtgggtctaataataggacggtcatgagtattaaataaaatgatgttaatagttagttgccctttggccaggtgcactggctcagcctaagcaacagatcctctctctacaaaaatagaaaacaggctgggcgcagtggctcatgcctgtagtcccagctacttgggaagctgaggcaggagaatcgcttgaacccgggaggcagagattgcagtgagctgagatcgcaccactgcactgcagcctgggtgacagagcgagactccatctctcaaaaaaaaaaagaaagaaaagaaaagaaaacattagccggatgcggtggtgtgtgcctgtagtcccagctactctggaggctgaggtgagaggatccccttagtccaggaggttgaggctgtggtgaaccatgttcctgccactgcactccaacctcggtgacagagtgacaccctgcctcaaaaaaaaaaaaaaagttcacatttgtatatagcacccacatgtgccaggccctgttctaagaattttgtgttttaaatatttgtgtctattaatttgtgtgaccttggagaaattaattttgccgggtttcagttttctcatctgctatgtggggatcaataacaccatatacttcacacaattgttgtgaacattcaacttacagagttatttctttttctttttgagacaaggtctcactctgtcacccaggctggagtgcaatagcgtcatcacagctcactgcagcctcaacctcccaggctcaagcaatcctcctgcctcggcctcccaaagtattggggttacaggtgtgagccaccgtgcctagccagaacacccaaattttatacaagcaaaggaaagacaacaaaccctgcatctgtggtctgagagcgcctggcatccaacttagaacctaatagatcacctagtcgttctcaggaatatgagaggcttaggaatgtgatctagccaaatggctgcccctctttcagcctgagtcccttctgcaataatcctatcatatgcttctggcgctggtgatagggatgagctcagggtttaggcacacagctcaggatgtatacggaggctacactgctgccattcgcagactgaataactgagcttttgagctcaaagtggtctgggctatttatgggtaactttcaggggctgcagggaggaacaaaccaataaataaaacatccatgcattcatccaataaacttttttttttttgagatgggagtctcgctctgttgcccaggctggagtgcagtggcacgatctcagctcactgcaacctccgcctcccaggttcaagctattctcctgcctcagcctccggagtagctggcattacaggcgcacaccaacacgcccagctaatttttgtatttttagtagagatgggatttcaccatgtcggtcaggctggtctcgaaatcctgacctcgtgatgtgcctgcctcggcctcccaaagtgctgagattacaggcatgaaccaccgcgcccggcctccaataaacatttattgggcacctacggtgttccaggcgctggtctaggcgttggggttacaacaacgcacaaaacataaattctgaagctgacacgctagctttaaacgttccttaaatatcttcatcctcaatttacggttgaggaaactgaggtgtagcgagaccttggaggtttccgaaatattattatggatggcaggtgtagagccctgccaacctctcgatcctgaagctccccttccagcctgagaaacggcaggttcaagtcccactgggagaccaaagcggggagcggctcagtttgccggcttgctcaatgggtaaggcgtgatggctctaagcaggcctcagttgtctcgtccagagcaatgggcagcgacgcctgcccaacccctcctgagcgcccagcctccctttcccggccggccccgcccccgcgatcacgtgacgcgtgggggttttcccgttccccaggcgtgacgtcacggcggggtgcagaccaatgggcgcgcaggccggcggcgccggggaattccgccgccccgcccccgcccgccgcccgcccggcccggccccgcgccccgcgcagccccgggcgccgcgcgtcctgcccggcctgcggccccagcccttgcgccgctcgtccgacccgcgatcgtccaccagaccgtgcctcccggccgcccggccggcccgcgtgcatgcttcggtctgggccagcctctgggccgtccgtccccactggccgggccatgccgagtcgccgcgtcgccagaccgccggctgcgccggagctgggggccttaggtaagcggggctggggttcaggagaggggtctggggcggggctggagatgcggggattctggcggtcccggagtagtctgggggttcctatgggagtctaagggtttcgcgggggcagagtgagggttcctgagacactgtattagggcgtaggaagaaggcagagggtgatgagggggtacggcccgaggttcgagcgaggcgtcccgctgtagagtgagagggggcggggcctgaccctgaggcaaagaagggggcgtggcctgactcagagaaggcggagcgaaagctgctcttgggcggtatcggggcggggccgggcccagagagggagaagaggggcgggatccgacccggactatgagaagagggccgggcctgactcaaaaaaggaagcagggccctacgctgaggggtgagggggcggggcctggccgtgagggcaggaagggggcggggcctgagttggccgaaagaaggggaaggggcggggcctgactctggccgagtggaggggaagggcctgttacccaaaaaagcagggcggggcccgacacagagaatgaggagggggtggggcttgcctccagacggagaagcggagccttgacattgaaaaaattaaaagtggtctgaccctgacaggaggatgtttttttttgtttgttttttgtttttttcttttgagatggagtctcgctctgtcgcccaggctggagtgcagtggcacgatctaggctcactgcaacctctgcctcccgggctcaagcagttctcctgcctcagccccccgagtagctggaattacaggtgcccgccaccacacccggctaatttttgtagttttactagagacggggtttcaccatgctggtcagactggcctcgaacttctgacctcaggtgatccgcacgcctcggcctctcaaagtgctgggattacaggtgtgagcccttgtgcccagcgggatggggactttttaaactgagattgagatggggtcccctccaggcccaactttaagggagaaaaggagcgggccctgagtgtgatgaagggtggggcgaaccacagaaactaaaggccaggacctgtccatgatttagctggtaagcctggccagacgcaggggggcagtcagggcgaggggcctgatccagaggggaagggctagaagaggaaggggtggggcttccttgggatattctctggtcctctggctgccccccatcacctcctgagacgtttctccttctctgcagggtcccccgacctctcctcactctcgctcgccgtttccaggagcacaggtgagcagccctccacagttcctgcccactcgctcatgcaggatgaggttgggaggactccacagagatgtctctgtttgggggttcacgaggtccacctcagctttctcctgacagggtgcatccctccctgccagttgagatgggccccctaggttttcttacctcttggactgttaagagcgtgacaggtggccgggcgcggtggctcacgcctgtagtcccagcactttgggaggccgaggcggacggatcacgaggtcaggagatcgagaccatcctggctaacacggtgaaaccccgtctctactgaaaatacaaaaacaaaattagccgggcgtggtggcgggctcctgtagtcccagctactcgggaggctgaggcaggagaatggcgtgaacctgggaggcggagcttgcagtgagccgagatcgcaccactgcactccagcctgggagacagagcgagactccgactcaaaaaaaaaaaaaaaaaaaaaaaaagcgtgacaggtaaatcttaccacctatccatgcgcaaaggcttctttagagattcactgtggcttagtagaaggtaatcactgccatcctgggctttggagctggggtttacatactgctgtcatcgcccctccctgtgtgaatgtctgcaagtcagttccccagttcaggcctcagttttcctcatctgtaagatggacagaataacagtgcctctctttcagggaaattgagagtattcaatgaattgatacaggtacactttccaagcagtatctggcacacagtaagggttcagtaagtgttaactgttagtggtataataataataacgataataattattattactagacagtctataacagtggttcatttttggtgtgtgtgtgggttttttttgtctgttttttgtgttttttttttttttttttttttttttgagacagagtctcgctgtgtcacccaggctggagtacattgatgcgattttgactcactgcaatctccacctcccgggttcagcaattctcctgcctcagcctcctgagtagctgggattacaggcacccgccaccacaacccactttgtgtctttagtagagatggggtttcaccatgttggccaggctggtcttgaactcctgacctcaggtaatccgcccgcctcagcctcccaaagtgctgggattacaggtgtgagccacctcgcctggccagacagtggttcttttttttttgagacggagtttcattcctgttgcccaggctggagtacaatggcgcgatctcggctcactgcaacctccacctctcaggttcgagcaattctcctgcctcagcctcccaagtagctgggattacagtcatgtgccaccacgctcagctaattttttgtatttttagtagagacagggtttctccatgttggtcaggctggtctcgaactcctgacctcaaaggatccgccctcctcggcctcccaaagtgctgggattacaggcgcgagccaccgtgcctggccagacagtggttcttaaaccatgtgcatcagaatcatccatagcgctagttaaaacataatgtcgcctgatgtggtggctcatgcctgtaatcccggcactttgggaggccgaggtaggctcatcacctgaggtcgggagttctagaccaggctgaccaacatggagaaacaccatctctactaaaaatacaaaattagctgggcgtggtggcgcatgcctgtaatcccaaatattcaggaggctgaggcaggagaatcacttgaacctgggaggtggaggttgccgtgagccgagatcatggcattgcactccagcctgggcaacaagagtgaaactccgtctcaaacaaacaaacaaaaaaacagccggccgtggtggctcactcctgtgatcccagcactttgggaggtcgagacaggcagatcacaaggtcaggagttcaagaccagcctggccaatatgttgaaaccccatctctactaaaaatacaaaaaaaattagccaggcgtggtggcaggcacctgtaatcccagctacttgggaggctgaggcaggagaatcacttgaacccgggaggcggaagttgcagtgagcggggatcgtgccactgcactccagcctgggtgacagagcaagagcctccgtctcaggaaaaaaaacaaaaaaccatgtcaggccccacctctcgagtttctgattcagtaggtttgggatgagaaattatttgcatttttagcaagctcccaagagatgcctagaactactagtctataaagtcccccagccaaaattcagtgctgcccaaggaaatgcagaatctcaaccaaattatgacattttttcttatatacatttgccaggatttggagggcaggggtagtcctgttgttatgaatactcagtggctccagttagctgggtctgggcctttctctggagatataatcttgggatggacccaagttctggcttggccattgaagaagtgaggccggttccccaacaggtctgtgagtttagggaggatggcatcagtgacagacactgcccaagcggtggtcctgcgcaggaacaaggctgagacttttcttttttttgagacagagtctcgctctgtcacccagcctggagtgtagtgtcacaatctcggctcactgcaacctccgcctcccaggttcaagtgattctcctgcctcagcctcccgagtagctgagattataggcgtgtgccaccatgtccacctaatttttgtatttttagtagagacggggttttgccatgttggccaggccggtctggaactcctggcctcaagcgatctgcctgccttggcctcccaaagtgctaggattacaggcatgagccaccgtgcccggccaaggctgagacttttctggtccaagacctagatctttggtttcaaatgagagttatttctgatgtcatccattcaataaatatttattatgcgcctgttctgtacctggccttgtgccgagcagtgctgaggacaggcctggccctggggttccctacctagatgaggaggcagacacgtaaacaataagttaaatatgggattataaaatgtgataagggctatgaagaaaccttggggtcaatgatatttaataacagggtggggatacgagaactagtgagatagaatgggaaggaaaattccctttttgtttttggaggcagagtctcattctgtcgcctacactggagtgcggtggcgtgatctaggcttactgcaacctccgactcccgggttcaagccatcctcctgcctcagcctctcaaacagctgggattccaggcgtgtgccaccacacgcagctgatttttgtacttttagagaaacggggtttcaccacgttggccaggcttgtctcaaaatcctgacctccactgatccagccacctcggcctctcaaagtgctgggattacaggcatgagccactgtgcccagcgagaaaatccccttcattgtgaagggccagacatatgctggaccctggggataaaatgaggagaaacagacattattcccactcttcaatgctcccagtctataggagacaggtatgagtcagtgtaatgtgaggtcatgtgacatcttcatcagcgccatgaaaatgataaaacaggctgggtgtggtggctcatgcctgtaatcccagcactttgggaggccgaggtgggtggatcacctgaggtcaggagttcaagaccagcctgaccaacgtggcaaaacctcatctctactaaaaatacgaaaattagctgggtgtggtggcctgtaatcccagctactcaggaggctgaggcaggagaatcacttgaacctgcgaggcggaggttgtggtgagctgagattgcatcattgcactccagcctgggtgacaacagcaaaactccatctgaaaaaaaaaaaaaaaaagaaaatgataaaacaaaggcacctgactttgagggactggagtgggggataaggggactctcttggataaaatggtcagggaagagctgtctaggatgtgacgtttgaccaaggaactgaagatggaggaggaggaagtcacgccatgcaaagaactgggggaagagcattcaggcagagaccagcctgtgcaaaggctgaggcagcacatacatagtcaatttcctgctctcacatctgctctcacgtggcccatcctggctgcccctgaatggtggcaagtccacgttgggggtaaagggaggcactgctatttgagcagaaacttgaataatttcctggctaatagaggacttgagataataataatattaactaagctttctggaagatgtcgcgtggtcagaacctgcactaagtagtttacctgtgtgattctgaatcctcatgttagttcctgaggtaggagctcacacctcattttgtagaggaagctcagagacggtaagtgacttgcccaaggctgcacagccagtgagtaacagctgagattcaaatcaactctatgtgactctacactccatgctctaaaatcatgcccatggccaggcgtggtggctcacacctgtaatcccagcactttgggaggctggggtgggtgggtcacttgaggccaggagttcgagaccagcctggccaacatggtgaaaccccgtctctactaaaagtacaaaaattagccgggcatggtggtacgagactgtaatcccagctactcaggaggctgaggcaggagaatcgctagaacccgggaggcagaggttgcagtgagccaagaatgcaccacactgtactccagcctgggtgacagagcaagactccatctcaaaaaatagaaaataggctgggcgtggtggctcacgcctgtaatcccagcactttaggaggccgaggtgcgcggatcatgaggtcaggagatcgagactagcctgactaacatagtaaaaccccgtctctgctaaaaatacaaaaaaaaaaaaaaaaaaaaaaagccgggtgtggtggtgtgcacctgtaatctcagctactcgggaggctgagacaggagaatcacttgaacccaggaggcagaggttgcagtgagccaagattgtgccactgcaccctagcctgggtgacagagcaagactccgtctcaaaaaaataaaaataaataaaataaaataaaataaaatattaaataaaagtatcttagcccaacaaggtaggcattattattgtgcccattttacagatgaagaagccaaggcacaaaaaggtgaagtaataggcttatggccccacaactagcaagttgcagagccaggatttgaacagaggcagtgaacccagagctccagccacagccgcccaggactcagtctccccctacagcccgggagcctctggagggtccaaagtctaactctgtctttgggtccccaggttcatccagcacagatgcctaagaaggattttcccagttcaagtgacttgaggttggccctgccactgacctagagcgtgtcccttcctctctgccagcctcagtatccccatctgccaaattggggggaccttggcaccctactggcttcacagatcccatgagataaggggtgcaggaaaactacctttcaaggggcaaaggtctggctgccaggagccactccctgagaacagaggaggacagatctagcagcggaacaggttcgcgtctataaatccccagccagagaccagcgcaggcagccctgggtgggacacctggctgcagctgccttccgttgctgtgtgattctaaggctcactggcggcctctgggcttccccttgtcctgtctatggaatgacgggaggtcggtttcgattcctccacgattctgtgaagggctgagctttcctggggaggtgaaaaggggcttccctgaggacccagcattactgtacctcctcacttaggaagcaggggtgaatctgggattttgggtggtcactgtgggaggacagggctggggtacagagcaagaggctgcctgggttcagatcagcctctttgcatctttttgttgttgttgttgtttgtttttgagacagtctcgctctgttgtccaggctggagtgcagtgacgcaatctcagctcactgcaacctctgcctcctgagttcaagcgattctcctgcctcagcctcccgagtagctgggattacaggtgcccaccacgatacccagctaatttttgtatttttagtagagacggggtttcgccatgttggccaggctggtctcgaactcctgacctcaagtgatctgcccacctcagcctcccaaagtgctgggattacaggcgtgagccaccaggcctggccacctctttgtatctttaaacaccagccagtgacctccaggaccctggggtggacttcagggagggaacacaccccaatttgtttggaaatttgggcatccactttttcctggtgctaagacccctttctaatgggttcccaaaaagacttcataatccctggtctaaatgtttttcgggaggcatttggcttagttggaggataccctgatgctgggaccccaacattagaggttgaaaggatggtagcccagaggagaagatgaggtttggggtttagtgccccagcaagtcagagcccagggtttcccaggacggaggaagacggaagggtcacaggagggacagggttggggaatctgtcttaaaagatgaaaagttgtgaccactttctggaccttacctttctctttctctttctcttccttccacagatgaattgggtgagtatcacagggcaggtttgcggggaggctgagggacccaagtgcctacagaagggggtcttggccttccttgttcagtgggggtgggggagaggtgtcactgtgtgacttccaggactgtggagggatttgaacgaagtcatgctcctaaggtacttagcagtgcttgacacttggaaaacactcagcacgccgggggctgtgtgactcacacctgtaatcctggcactttgggaggcagaggcaggaggactgcttgaggccaggagttcaggactagcctgggtaacatagtgagacccccatctctacacaaaatttttaaaaattagccgggcatggtggtgcgcacctgtagtcccagctgctcaggaggctgaagtgggaggatcacctgagcctgggaggttgccttggaagccgaggctgcagtgagctatgattgcaccactgcactgcagcctgggcggcagagcaagaccgtgtctcaaaaagaaaaccaattaaaataaaataatgttattaatcccctagtgagtacagacagacactgttttaggccctggggatttagccatgaacaaaaccaagtccctgccctcgcagagctgatagcccggtgtgggagacagaggaaaatgaacagatgagcaagataatgttagcctgggctgagagctgtgaaagaaataaacaggacgagggagagatggcctggagaagacacattaggttaggcttttctgaagagataacatacgagctgagaccaggaggagaagcagccagcatgggttgaatgggggaccgtgtggaacaggcagttggaggagcaagttctttcttatttatttatttaagttattttttgagacagagtctcgctctgtcgcccaggctggagtgcagtggtgctgtctcagctcactgcaacctccacctcccaggttcaagcaattctcctgcctcagcctcccgagtagctgggagtacaggcatgcaccaacatacctggctcatttttgtatttatttatctatttatttagagatggaatttcgctcttgttgcccaggctggagtgcaatggcatgatcttggctcactgcaacctccacctcccaggtttaagtgattctcctgcctctgcctcccgagtagctggaactgcaggcacacatcaccatgcccaatttttatatttttagtggagatggggtttcaccatgttcgccaggcaggtctcaaactcctgacctcaggtgatccgcctgcctcggcctcccaaagtgctgggattacaggcgtgagccaccatgcccagcctatttatttatttattattattattttttgagatggagtcttgctctgttgcgcaggatggagtgcagtgacgcaatctcggctcactgcaacctccgcctgacggtttcaagcgattctcctgcctcagcctcctgagttgctgggactacaggcacgtgccaccatgcctggctaattttttgtatttttagtagagacagggtttcactgtgttagccaggatggtctcgatctcctgacctcatgatccgcccgcctcggcctcccgaaatgctgggattacaggcatgagccaccgcgcccagcctattatttattgagagacggagtctcactctgtcgcccaggctggcgtgcagtgtcacgatcttgacttactgcagtgtccgcctcctgggttcaagctgttctcctgcctcagcctcctgagtagctgggattacagacgtgggagaccattcgggctaatttttgtagagacggggtttcactatgttggccaggctggtctcgaactcctgacctcaattgattcacccaccttggcctcccaaggtgttgggattacaggcgtgagccaccgcacctggcctccctgactctgtgtgtgtgtgtgtgtgtgtgtgtgtgtgtgtgtgtgtgtgagagagagagagagagagagagagagagagagagagataaatgggatggaaaacgtctcgggggtaatcaagcctttttttttttttttaattttttaaagaatgggcgtcaccacccgttttttcttctcccgcagagatcatcgacgagtacatcaaggagaacggcttcggcctggacgggggacagccgggcccgggcgaggggctgccacgcctggtgtctcgcggggctgcgtccctgagcacggtcaccctgggccctgtggcgcccccagccacgccgccgccttggggctgccccctgggccgactagtgtccccagcgccgggcccgggcccgcagccgcacctggtcatcacggagcagcccaagcagcgcggcatgcgcttccgctacgagtgcgagggccgctcggccggcagcatccttggggagagcagcaccgaggccagcaagacgctgcccgccatcgaggtgggcccggcgagcggccccgggcgggtgggactggggcttcccctgcaccccggagccatccacatgcatttatacgtttatttgatggtggctgttgttgttattgttggaccagatattaattatactatcacctggcctggaatccaaaaggttcagaaaaaaggaggggtcggacatttggctgggcacggtgactcgcgcctgtaatcccagtactttgggagtctgaggcgggcggatcccttgatgtcaggagttcgagaccagcctggccaacatggtgaaaccccatctgtactaaaagtacacaaattagccgagtgtggtggcacaatcccagctatttaggaggccgaggtgggaggattagctgagcccagggaggtgcaggctgctgtgagctgagattgcaccattgcatagcagtctgggtaacagagtgagaccttgtctcaaaaaaaaagaaaaaaaaaaaagaaggcagatcgtggtgcggtggctcaggcttgtaattctagcactttgggaggtcgaggcgagcggatcactcgagctcaggagttctagatgagcctgggcaagacggcaaaaccccatctctacaaaaaatacaaaaattagccaggtgtggtggcacatggctgtagtcctagctacatggtagggctgaggtgggaggatcgcttgagcctaggaggtcaaggctacagtgagccaagatcgcaccactgcactccagcctgagcaacagagcaataccctgcctccattaaaaaacaaacaaatatatataacactggaagtaaaaaaagcaaaggtgattacttttggcagggtattaatgtattaataaggtacaggtaagttttatttttttgagacggagtcttggtctgttgcccaggctggagtgcagtggtgtgatctcgcctcactgcaacctccacctcccgggttcaagcgattctcctgcctcagcctcccgagtagctgggattacaggtccaccaccacgcctggctaatttttgtatttcttagtagagaaggggttttgccatgttggccaggctggtctcaaacccctgacctcaagtgatccgcatgccttggccttccagagtgctgggattgcaggtgtgagccactgtgcctggcctctttggtgtctgttaatctggatctgttcttcaatctgtctttgtgtttcgtgagttgaacatttgtgcagaacaggacggatgttttgtagaatgtcccacattctgaagctggtcgtggtggctcatgcctgtaatcctagcactttgggaggccgaggcaggcggatcacctgaggtcgggagttcgagaccaccctgaccaacatggagaaaccccatgtctactgaaaatacaaaattagtgcggcgtggtggtgcatgcctgtaatcccagctactcgggaggctgaggcagaagaatcacttgaatccgggaggcagaggctgcggtgagccaagatcgtgccattgctctccggcctgagcgacaagagcaaaactccttctaaaaaaaagaaaaagaaaaagaaaaaaagaatatcccacattctgggtttgttggctgtttccagattaggtcagattatgcatttttggcagaaacactccagcagtgatgctgtggccttctcagtgtctcacatcaagggacgtgggatgtcgttattcccaatattggtgatgctgagttggatcctccagctaatgtggtgactatcaggtctctccatgataaagatacaactttccctttgtaatgaattggtaagttatctatgggatgatatactgagatgtatcatcccatgtttaactgtattccccaacttctaatttctaaggcttttttttttttttttttggagacagggtctctctctgtcacagaggctggagtaaagtggcacaagcacggctcactgcagcctccacctcccaggctcaagagaccctcccacctcagcctcctgagttgctgggactacaggtgcatgccaccgtgcctggctaatttttgtatttttttgaagagttggcatctcaccatgttgtccaggctggtcttgaacttctggcctcaagcaatcctcccactttggcctcccaaagtgttggaattacatgtgtgagccaccgcaccggcctaatttctaagtcttcccaggcagttattctggctcagagtttttttttgttttttggttttttttttgatggaatcttgctctgtcacccaggctggagtgcaatggtgcaatctcagctcacagcaacctccacctcctgggttcaagcgattctcctgcctcagcctcccaagtagctgggattacaggcacgcgccatgatgtccggctaatattttgtacttttagtagagatggggtttcaccatgttggccaggctggtcttgaacttctgaccccaagtgatctgtctgcctcagcctcccaaagtgctgggattacaggtgtgagccaccgtgctcggaccccagagttggttttgatttccaagatttagaatggtaaatgcctaaccatagggaatgacctgtctccaaatctggattcaggatttttttttttttttttgagacggagtcttgctctgttgcccaggctggagtgcagtggtgtgatctcagctcactgcaacttccgcctcctgggttcaagcgattctcctgtcttagcctcccaagtagctgggattacaggtgtgcaccaccatgcccagctaatttttgtatttttagtagagacagggtttcaccacattggccaggctgatgtcaaactcctgccctcaggtaatccacctgcctcggcctcccaaagtgctgggattacaggcatgagccagcatgcctggcttggattcaggatgtttatccccatcttcagagtaggaaactgaggttaaaagaggggcagttacctgcacagggcacacagcaagtttactattgtaattaccgccatttactgagtgcttccatgtaccaggtactttgcatacctattttacacataaagacagtaagacccgagaggtttatcttgtagatggccagtggtagagcctggatttggtgccaggtcggacttattctaaagcctaatgggccaggcatggtggctcatgcctgtgatcccagcaccttgggagactaaggcaggaggatcacttgaggccaggagttcaagaccagcccaggtgacatggcaagatgcccgtctctataaaaataaaaaaattagccaggcgtggtggcatgcgcctggggtcccagcaccatgggaggctgaatggggaggattgcttgagcctgggaagtggaggctgcagtgagccatggtcacaccactgcactccagtctgggtgacagagaaagatgctatctcaaaaaaaaaaaagaaaaaagaaacaactaaagtctaatgttttttccacagtcccaactgacatctcaaggatgaaaagctttcagccctggagtctgcatgagtccgagactgttgactctaagcttttcagaatctcctactattacagcggggagctggttaaatgaatggttttaaccctatctgacccagtgagatttgtagacaatattacctacctctattcacagtcactcccaaagtccatattttattttattttattattattttttttttgagatgcagtctcgctctgtcacccaggctggagtgcagtggcatgcaacctccgcctcctgagttcaagtgattctcctgcctcagcctcccgggtagctgagattacaggcacctgccagcaggcccggctaatttttgtgtttttagtagagacggggtttcaccatgttggccaggctggtctcgaactcctgacctcaagtgatctgcctgcctcagcctcccacagtgctgggattacaggcgtgagccaccgtgcctggccaaaactccatattttacaccaaactgtagtataaaagagaaagaaaaggaaattaatacagcatatataatcacatttatttcaatatgtaaacgccccacaggatatatgaggaaggtggcagttgtttgtgactatatataggctccttgttaatgccgtggccacaaatgcagcctgacccagctgcgcagacttagtgacttatatgtcacacgtgcagggttgcggttggtgaggggattttccaaagtggcgaacaactcttggtctaaacaattagtgtgctggttgcaatctttgaaaattcagtgggtattacagttatgggaaactccagcctgggtgacagagttagacctcgtctcaaaaaagaaaaaggaaaaacaattatgggaaagaatattattggtgtcaaacagagcaagggccaggtgtgatgcatgcctgtaagcccagatgtttgggagactaaagtggaagtattgcttgagtctgggaggcggaggttgcagtgagctgagatcgtgccattgcactccagcctgtgcgagatcctgtcttaaaaacaaacaaacaaacaaacaaacaaatccactcagcaacaatagagcaagtttctgggatctggtcattttaaacaggtttcttattgactcgaatctttggcaggatgttcagaaggcttgctggctgtgggatggctgtgcgggactgtccctggtattataaactgtccagcataactggtcctgtctacttgcggtagggtccacatcagtgtcaaccagccaccccccaaatcccatttttcccctagggggcagcactcccccactgagaccaatggttaatggtattttataggcttgggctttagaagttcagagcaggcttcagaaggtatttaatgccagcagggctgagccagtgactcaaagctgccaagtgggactggccctgcctaacggggctggtttttatttgctgctgcctgtggctgctgagcaaaaattctggcttcacttgctatatcttccttttttaaaaaagaaaaatctggggaggccgaggtgggcggaccacctgaggttaggagttcgaggccctggaggctgggatcgcaccactgcactccagcctgggcaacagagagaatctgtctaaaaaaaaaaaaaacaattctggaaatccgaaataatgtgatgtcttataattttaattgtgggctccaagtttttcctaatcttttacttggaaaaaaaagttttagttttttcctgtctagtttttctttttaagttttattgaggtataattgatgtaagaaaaattgcacatacttaatgtatacattttgatgaatttgttattattcctttttttttttttttgagacagagttttgctcttgttgcccaggctggagtgcaatggtgcgatctctgcctctcaggttcaagcagtcctcttgcctcagcctcctgagttggtaggattacaggcctgtaccatcatgcctggctaattttgtatttttagtagagagggggttttgccatgttgcccaggctggtctcgaactcctggcctcaggtgatccacccgcctcagcctcccaaagtgctgggattgcaggcacgaaccaccgtgcccagcccttttgattagtttggatgataaaagaatttaaacctagagaccaggcgcggtggctcacgcctgtaatcccagcattttgggaggccgaggcaggtggatcacctgaggtcaggagttcgagaccagcctggccaacatggagaaaccccatctatactaaaaatacaaaaattcttggccgagcgtggtggctcaggcctgtaatcccagcactttgggagactaaggcaggcagatcacaaggtcaggaggtggagaccatcctggctaacatggtgaaaccccgtctctactaaaaatacaaaaaattagccaggtgtggtggcgggcgcctatagtcccagctactcgagaggctgaggcaggagaatggcgtgaacccaggaggtggagcgtgcagtgagctgagatcgtgccactgcaccccagcctggccaacagagcgagactccatctcaaaaaagtaaaataaaataaaaatacaaaaattagccaggcatggtggcaggcacctgtaatcttagctacttagaaggtagagacgagaatggcttgaacctgggaggcaggggttgcagtgagctgagatcatgccattgcactccagcctgggcaacagagcaagactccatctcaaaaaaataaataaataagaatttaaacctacagaaaagttaaaaaataatacactgagtatctttgaaaggtgagtgcctgttatttatttatttttttttaattttttttgagacagagtttcgctcttgttgcccaggctgtagtgcaatggcgcgatctcggctcactgcaacttgtgcctcccaggttcaagcgattctcctgcctcagcctcccgagtagctgggattacagacatgtgccaccacgccctgctaattttgtatttttagtagagacggggtttctccatgtcggtcaggctggtctcgaattcctgacctcaggtgatccacccgccagattacaggcgtgagccaccgcgctcggctgaaagctagtgcctttcatctatattcaccagttgacattttgccacatctgctgtgtctctcattctgtctccgcacagccaaacatacacacacacagatacatacatttttgttttgttttgagacagggtcttgctctattgcccaggctggaatacagtgacgccatcacagctcactgaagcccggatctccagggttcaagcagttttcccatcttagcctcctgagtacctgggactacaggtgcattccaccacacctggctgatttttgtattttttgtagagatggggtctgcacatgttgcccaggctggtcttgaactcctgtgctgaagcaacccaccttccctggcctccaaaaagtgctgggattacaggtgtgagccaccacgcctggccgacacattgtttttttgatgactcatttacaaatgaattgtagccatcatgctacttcacccctaattccttcaggatgtatctcctaatcataagctcctctgtagctacaatctcattaatcacctctaggaaaattagtaatcccatcaaatcatgtaatatacagtccatatttcaatttcccaattgtttccaaaatgtgttttatagttgtttcttcctccttaatccaggatttaaccaaggatcatgttgcatttggttgtcctatctcattagtctctctccttctctctttatttatgtatttatgtatttatttattttttgagaaggagtcttgctttgtcacccaggctggagtgcaatggcacgatctgggcccaccgcaacctccatctccagggttcaagtgattctcctgcctcagcctcccgagtagctgggactacaggcatgtgccaccacgtgcggctaattttgtatttttagtagagacggtgtttctccatgttggtcagcctggtctcaaactcccgacctcagttgatccacccacctcggcctcctcaaactcccaacctcaggtgatccacccacctcggcctcctcaaactcccgacctcaggtgatcccccacctcggcctcccaaagcgtcgggattacaggcgtgagccactgtgcgcagcccttctctccttttttaaaaaaattaagatataattgatcatatatagttaagattaaagctctgaatttttacatataatgtatacatatgtagtttacacagtgtaactacctaccacccaggcacccaggtcacaatacatgatttattctctttctctctctctctttttttttttttcttttttgagacagggactttgtcacccaggctggagtgcagtgacgcaatctgggctcattgcaacttccacgtctcaggcttaagtgatcctcccacctcagcttccagagtagctgggattatagatgcctgtcaccacacctggctaatttttgtattttttatagagacggggttgcccaggctggtcttgaactcctggtctcaagcagtcctcccacctcaacctcccaaagtactgggattacaggcgtgagccactgtgcctggcccatcatttgttgtcttttaaccccaaatgtggcacccatcttttttttttttttttttttttgagacggagtctcgctctgtcgcccaggctggagtgcagtggcgcgatcttggctcactgcaagctccgcctcccgggttcacgccattcttctgcctcagcctcccaagtagctgggactacaggtgcccgccaccacgcccagctaattttttgtatttttagtagagatggggtttcaccatgttagccaggatggtctcgatctcctgacctcatgatctgcccgtctcagcctcccaaagtgctgggattacaggcgtgagccaccgcacccggccatggcacccatctttatagtcttccatgacactgaaattttcacgtggtggctcatgcctgtcatcccagcgctttaggaggccaaggcaggcagatcgcttgagttcaggagtttgagaccagcttgggcaatgtagcgaaactccgtctctactgaaaacacaaaaattagccaggcatggtagtgtgcgcctgtagtcccagctactcaggaggctgcggcaggagaatcccttgagcccggaggcggaggttgcagtgagctgagatctcccgccaccgcactctagcttaggtgatacagcgagaccctgtcacaaaaaaatttaaaaaaggccaggcacggtgactcacgcctgtaatcccagcactttgggaggccgaggcgggcggatcacgaggtcaggagatcgagaccatcctggcgaacacggtgaaaccccatctctactaaagatagaaaaaaattagccgggcatggtggtgggcacttgtagtctcagctactcgggaggctgaggcaggagaatggcgtgaacccgcaggcagagcttgcagtgagcggatccagcctgggcgacagagcgagactccatctcaaaaaaaaaaaaaaaaaaagcctgagtggcctaaaaaagcagcctgtagggcagatattatatgaggccccccagttcatcagttggaagcttctggtttaggatatcaaagtggcctttttttttttttttttttttgagaccgtcatattctgtcacccaggctggagtgcagtgtcaagaactcggctcactgcatcctccgcctcccaggttcaggcgattctcctgcctcagcctcccgagcaggtgggattacaggcatgcgccaccatgccgggctaatttttgtattttcagtagagactgggtttcaccatgttagccaggctggtctggaactcccgacctcaggtgatccgcccacctcggccttccaacgtgctgggattgcaggcgtgagccacctcgcccggcccaaagtggtcttaagcaaacacattccatcatcctggtcgcgggagaaggttggggagctcccaacagaggaccctagtggggagaggattggggagctgccaaggaaggccccaaggagtttggatggacgcaggcatcggtgatgggacccccaaagaggacttctcttcctgcagctccgggattgtggagggctgcgggaggtggaggtgactgcctgcctggtgtggaaggactggcctcaccgagtccacccccacagcctcgtggggaaagactgcaccgacggcatctgcagggtgcggctccggcctcacgtcagcccccggcacaggtacccaccccctgacctccgacctctcatccttgatcatggagattctaagcgactggaggccacccatgaaactttagagcagagggcagcttgggtaaaccctccccactgcctcttctaggtgggagacaggcctggggacagtggagggcctcacttaggcctggagccttgccacacacatattcacatacattttatccctattttgtagaggaagaaactgaggctcagagagggtaaggagcacagataattgatgacagagctgggatttgactgcagacctgacttaactgcaaggtctgttctttctcttactttacaattcatctttttttttttttttttgggacggagttttgctcttgttgcccaagctggagtgcaatggttcgatctcagctcactccaacctccacctcccggattcaagtgattctcctgccccagactcccgagtagctgagattacaggcatgcgacactacacccagcgaattttttggatttttagtagaaatggggtttcaccatgttgaccaggctggtctcgaactgctgaccttaggtgatcctcccagctcggcctcccaaagtgctgggattacaggcatgagccaccgtgccggccttttctttctttttaaaacagaagcactgtataacttttattttgcatatgtccacaaatgcttacacaacatacagtggctacatctaaaactttgagcattttttcatagtgcaaagagacagaaaggtagtgacacacttcactgtgttacactgactttgggtagagccctaaaggcagcacgcacttcagaggtagggctgagtattgctcacactcaggtctggaagatttaattttagaaatttttaaacttagtgaaaatataagttccgagagcagagatcttgtctcttacattccctgctgtattccgagtgtctggcatagtaactggcacatagtaggtgctcaggaaatatttgtggaatgaatgaatactgccatgttatgcaatttacagacccatcagtaatgggtgagagcacctgattctccacaacctcaccagcaccgagtattatgaaacattttgatttttgctattttgatgagtgccccaaaacaaaggcatcttcattggtgtttaatttgcagttttctttccttccttccttccttccttccttccttccttccttccgtccttctttctttctttctttcagacagagtctcgctctgtcgcccaggctggaatgcagtggcgcgatctcggctcactgcaagctctgcctcctgggttcaagtgattctcctgcctcagcctcgcaagtagctgggactgcaggcgcccaccaccacacccggctattttttttgtatttttagtacagacggggtttcgccgtgttagccaggatggttaccatctcctgacctcgtgatccgcccgcctcggcctcccaaagtgctgggattacaggtgtgagcccactgtgcccagcctcttttttttttttttttttttttttttttgagaccgagtctcactctgtcacccaggctggagtgcaatggcacgatctctgctcactgcaatctctgcctcctggattcaaacgattctcctgcctcagcctcccaggtagctgggattacaggcgccagccaccacacctggctaatttttgtatttttagtagagacggggtttcaccacgttggtcaggctgatctcaaaattctgaccttgtgacccacccgcctcggcctccaatttttgtatttttagtagagacggggtttcaccacgttggtcaggctgatctcaaaattctgaccttgtgacccacccgcctcggcctcccaaagtgctgggattacaggcgtgagccaccgcacctggccctgaagttttcttattttatttatttatttatttattttgagacggagtctcgctttgtcgcccaggctggagtgcagtggcgcgatctcggctcactgcaaactccgcctcccaggctcacgccattctcctgcctcagcctcccgagtagctgggactacaggcacccgccaccatgcctggctaatttttttgtatttttagtagaggcggggtttcaccgtgttagccaaggtggtctcgatctcctgacctcctgatctgcccgtatcggcctcccaaagtgatgggattacaggcgtgagccaccacgcccggcctgaagttttcctattaaagatgaagttggccagtgttctcacatggtaaagataaggcatgttctggatcttctcaagaacctttgacatgcttatttttattttttgagacagattcttgctctgtcgccaggctgaagtgcagtggcatgatctcatctctctgcaacctctacctcccgggctcaagcaattctcctgcctcagcctcctgagtagctgggattacaggtgtgcgccaccacacccagctaatttttgtatttttagtagagacagggcttcaccatgctggccaggatggtgtccctctcttgacctcgtgatctgcccaccttggcctcccaaagtgctgggattctacagatgtgagccaccacgtctggccaaaaggtttattttattttttattgtttgagatggtgtctaactctgttgcccaggctggagtgcagtggcacaatctcggctcactgcaacctctgcctcccgggttcaagtgattcttttgcctcagcctcccgagtagctgggattacaggcatgcactactatgtctgctaatttttgtatttttagtagagacagggtttcaccatgttggccatgctggtcttgaactactgacctcaagtgatcctcctgcctcggcctcccaaagtgctgggattacaggtgtgagccaccgcgctggccttctgagaggtttaaaccccagaccgtttctaatgctgggacccctgggcctgggatgtcagcccctgagagcctgagccccacagcagcatctgccagagccctcctgcaggttagggccacacttgcctgctcacgagcactcctctccctcccccgtcaccccctcagttttaacaacctgggcatccagtgtgtgaggaagaaggagattgaggctgccattgagcggaagattcaactgggcattgacccctacaacggtgagcaccccctgcctgacctgaccatcccgtcctcccaaaccccttgacttccgtgctcaccctggtcccctcaccactccaggccccaccgtctcctccagccccatcccttccccgttcccctgtaccccagagagggtctccacttcccaccctcagcctccccatatctcccccgacagctgggtccctgaagaaccatcaggaagtagacatgaatgtggtgaggatctgcttccaggcctcatatcgggaccagcagggacagatgcgccggatggatcctgtgctttccgagcccgtctatgacaagagtgagttgagagtgctgtggccgttaggattgcccttggctgcaggtgtcagaatgtcccgcttacagaggcatgaatggctcaggcgctgtggctcacgcctgtaatcccaacactttgggaggtcgaggtgggaggattgcttgagcccaggagttcaagaccagcctgggcaacttggcaaaaccctgtctctataaaaaatttaaaaattagctgggtggccaggcacggtggctcatgccggtaatcccagcactttgggaggccaaggcgggcaggtcacctgagaagtcaggagtttgagaccagcctggccaacatgccaaaaccctgtctactaaaaatacaaaaattagctgggcgcagtggcaggcgactataatcccagctactcaggaggctgaggcagaagaattgcttgaacccgggaggcggaggttgcagtgagccgagatcgcgtcactgcgctccagcctgtgcaacagagtgagattgcatctcaaaaaaaaaaaattagttgggcatggtgacatgcacctgtagtcccagctactttggaggctgaggtgggaagattgcttgagcccaggaggttgaggctgcagtgagctgtgatcatgccactgcagtccagcctgggcaacagagcaagtggtgaaatcctgtctctactaaaaatgcaaaaattagctgggcatggtggcacacgtctgtaatccctgctacctgggaggcggaggttgcagtgagctgagattgcaccactgcactccagcctgggcaatggagagggactccgtctcaaaaaacaagaaaaaaaaacatcaaacccaaaatggaatcttctagtgttgtagaatgaacaatctgtacaactataccaggcagcccaagggaagaggcagcataagtaataatctctctccctttctgagagagtgcattatattccacagaatcaccctggtagacttctgcttatttttcagtggccagagcttggtcccatggccactcctagttgcagggtggtctgggaaagcaagtgcttagatttttcaccctctatagagggatacaggcatagaagaggggactgggaataactggtaggttttagccaacccatagtgactgctgtaagcatcaaaatgggatattaattcagtcagggcatttatggatgcaagtgatagaatcccaacttagccgggcgaggtggcttacgcctgtaatcccagcactttgggaggacgaggtgggcagatcacgaggtcaggagatcgagaccatcctggctaacatggcgaaaccccgtctctactaaaaatccaaaaaaaaaattagccgggcgtcgtggcgggcgcctgtagtcccagctactcaggaggctgaggcaggagaatggcgtgaaccctggaggcggagcttgcagtgagccgagatcgcaccactgcactccagcccgggcaacagagcgagactccttctcaaaaaaaaaaaaaaagaatccttacttaaataggcttaagggggaaaaaagagaataagttattctatttgttctattaacgagaaaaaatgcagatgtagcatagtgcttcaggtctggctgcatccagggcctcagtgatgtcattagatatctgtctctttctgtctctcagctgttcttcctccatgttagaatccatgcttatatcctacctgcctggcacctctccccgactcccaaagctgcttttagcttctcttacctaatagctttgcttaaagtctcaggtctatctctcattggcctggttttggtcatttgctcctttttgacaaatcagctttggccagagggatgcactgctctgattggccaggtctggggcatgcgctcaattactgctgagctaggaagtgggctcagccctgcccaatcccagttactaagatgaggggtggtcccttgagggaaaattggaggctgttaaaagaagaggggtcaggactactagatggggaaaacaacaggtgtccactacatgattacagtctatcaaactctcctcaaggaaccttctctcacctgggaccccatcaactctccctgaggtctgagggtctcccttaaacattttttaaaaattatttttattatttttttttagagatagggtctcactctgttgcctaggcagtcatgcagtggtgcagtcatagcttactgcagcctgaactcctgggctcaagtgatcctcccagttcagcctcacaagtagctgagactacaggcatgtgccaccacacctggctaagttttatttttaaaactttgtagagctagagtctcaccatgttacccaggctggtccagaactcctgggctcaaacgatcctccctcctcggcccctcaagtgctggcattacaggtgtgagccatcatgcctggcaattttttttttcttttttgagagagatgggggtctgctatgttgcccaggctggtcttgaacttctggcctcacgtgatcttcctggctgggcccccaaaagtgctgggattacaggtgtgagctaccttgcctagcaaaggatcttcttttgttttgttatttttttgtttgtttgttttttgttttgagacggagttttcctctgtcacgatggagtgcagtggtgcaatctcagctccctgcaacccctgtctcctgggttcaagtgattcttctgcctcagcctcctgagtaactgggaccacacccagctaatttttgtatttttagtagagtcagggtttcaccatgttggccaggctggtctcaaactcctgacctcaagtgatccacctgcctcggcctcccaaagagctgggattacaggcgtgagccaccatgcccggcaaaagatcttcgttttggacagacactcaccgggcttcagcttgagggctggcgattgttcgttaaccccttctgtccgagtgacttctttctccacctggactatgggttccatgaggatcagatgccctgccttttcaattccctacgtctccagggccccggggatggcacccactgggtgcccagtaaggctttggtgactgaattctcgggattttttttaatacacttcttcctcttgctccttcccagaatccacaaacacatcagagctgcggatttgccgaattaacaaggaaagcgggccgtgcaccggtggcgaggagctctacttgctctgcgacaaggtgcagaaaggtgaggggcctggggcagcaagcttgggcagagcggggtctggcaacttggaggggtagccagggagcccgggaagatgaaaggatgagaaagagctggttaaccagggcaccagagtgcaagggtccagaacactgtctttgcagtcagacacagctgatgggttcattcactccctgagtcgccttctcacccgtctgcgtaggacgacagagactcgtctgtggtgacccatgctgcaagctaggcggtgccatcacagagctcacgacatgtccagaggactctgatgttaagggtggaattgcataaatgaacgctttacggtggttctgataagcgctatgggtaaagcaaataggacaggagaagcaactccacttcattcatctctgttcaaatggcccttcctcaaacaggcttttaaaaaaaaaagacagctggtcaccgtggctcaagcctgtaatcccagcaatttgggaggctgaggtgggtggatcacttgagctcaggagttcgagaccagcctgggcaacatggtgaaaacccatatctactaaaaatacaaaaatgagggctgggcgcagtggctcatgcctgcaatcccagcactttgggaggccaaggtgggcggatcacctgaggtcaggagttcgacaccagcctcccaacatggtgaaaccccatctctactaaaaaacacaaaaatgagctggttgtggtggcatacacctgtaatcccagctactcgggaggctgaggcaggagaatcgcttgaacctgggaggcagaggtttcagtgagccgagatcacgcctctgcactccagcctgggccacagagcaaagctctgtctcaaaaaaaagaaaaaaagaaagaaaagaaaaagacagctgggcacagcagctcatgcctgtaatcctagcacagttttggaggctgaggcgggcagatcacttgaactcaggagttcgagaccagcctgggcaacatggtgaaaccctgtctctacaaaaaataaaaaatttagcaggtgtggtagtgtgcacctgtagtcccagttacttgagaggctgaggtgggaggatcacttgagcccgggaggcggaggctgcagtgagccaagattgcaccactgctctccagccagggcgacagagacagaccctgtctcaaaaaatcaaaaccaaaaacaaaccggctgggctggtggctcatgcctgtaattctagcactttgggaggctgaggtgggaggatcacttgagcccaggagtttgagtccagtctgggcaacatagcaagcccccatctctacaaaaaaaagttctttttaattaaaaaatagccaggcattaggccggctgtggtggctcacacctgtaatcccaatactttgggaggccaaggtgggcgaatcacttatggtcaggagttcaaaaccagcatggccaacatggtgaaaccctgtctctactaaaaatataaaaattagctgggtgtggtggaacacacctgtaattccagctacttgggaggctgaggcacgagaatcacttgaacctgggaggcagaggttgcagtgagccgagatcatgccattgcacaccagcctgggcaacacagtgagactctgtctcaaaaaatgaaataaaatagccaggcatgttggggcatgtgcctgtagtcccagcacttgggaggctgaggtaggaggattgcttaagtgcaggagttggaggttacagtgagctatgatggtgccaccgcactgcagcctgggcaatagagcgagactctgtctcaaaatagaataaagtaaagtgaagaaactggttccagagatatctagtaacttccccaagttataacagagttggtagtgaagagttctagccttcctgggtttccatcttggctctaacacttgccagctgtgtgaccttggacaagtgacttcacctctctgtgccttcattttcgtctttatacaatacggtacctaatagtaccttcttcatagagttgttgtgtgacttagaggcaatctatatgtaactgacacatataaagtctcagtacatggaggtactgtgatgacgggcgatgcagtaagacaagaaaaataaatagcaggcagagtagcatcatgaatcctgactcttccgctaccagttgtgtgatgtctcaacactttcaagcctcagtttccgtttttgtttttttttttaagaaccaggctctcgctctgtctcttaaatagctgggaccacaggcgtgcgccaccatgcctggctaattttttaattttcttgtagagacaaggtcttgctgtgttggccagtctggtcttgaactcctggcctcaagtgatctgccagctttagcctcccaaagggctgggattacaggtgtgggccactatgcctggacaggcaccttttttctctgctgactgtgcctggtatccttttgccataacagatcatagctgtgagtatgactgtatgctgtcttgtgagtcctcttactgaaccacctgagggtgatcttgaggatccctggacatgagggggatattaattcttttgtttgtttgtttgaggcggagtcttgctctgtcccccaggctggagtgcagtggtgcgatcttggctcactgcaagctccgcctcccgggttcacgccattctcctgcctcagcctcctgagtagctgggactacaggcgcctgccaccatgcccggctaatttttttgtatttttagtagagacggggtttcaccatgttagccggggtagtctcgatctcctgacctcgtgatccgcctgcctcggcctcccaaagtgctgggattatgggcgtgagccaccgtgcctggcaagggggatattaattctacctacctcttaaattgttataaggattaaatgagataatatatataaaaatacataaaacaaggccgggtttggtggcttacatctgtaatcccagcactttgggaggccaaggcgggcagatcacgaggtcaggagagcgagaccatcctggccaacgtggtgaaaccccgtctctattaaaaatacaaacattagctgggcgtggttgcacatgcctataatcccagctactcgggagactgaggcaggagaattacttgaaccagggagttggaggttgcagtgagccgagatcatgccactgcacttcagcctggaggcagagtgagactccatctcaaaaacacacaaacaaaaaaaaaccaaaaataaaattagccgggcgtggtggcatatgcctgtaatcccagctattccggaggctgaggcaggagaattgcttgaacccgggaggcagaggttgcagtgagctgagatcgcgccattgcactccagcctgggcaacagagcaagactctcaaaaaaaaaaaattttaaaaagggggaatattagtcttgattttaggggaggctgggcaagttgggagcacagtggtccagatgtcctggcttagctgatgtcccccgtttcctgccagaggacatatcagtggtgttcagcagggcctcctgggaaggtcgggctgacttctcccaggccgacgtgcaccgccagattgccattgtgttcaagacgccgccctacgaggacctggagattgtcgagcccgtgacagtcaacgtcttcctgcagcggctcaccgatggggtctgcagcgagccattgcctttcacgtacctgcctcgcgaccatggtaactacagcaacccagggtgacccaccacctcggagactaggtctttggccttggggagaccccagtggggatgggaaagaggcagaactagaatgcaggctcagagctacaaagacagtgttcagatcctggctctgctgcttactggttgtgtgaccttggcctctctgagcctcattcttctgtgcaaaatggaaataatagtagctgtcctgtgacatttggagagtatttaatctttcctcccctcagcatcctgcacatgcccgggcctgtgctcggtattgctagagacacagcagtgaccagcacggcccctagctgtgtcctcatgaggcttatagtcctgaggataggggacagcctgtccctacagagtgatgaccagagtgggcaggactggaatgaagtgctcaagggctcacattgcccagagggggtacctgacccagctgtaggtgtcagggaatgcttcttggaggaggggacagctgagctgaggacaggaggatgactaagcagggaagttttctagggaaatagtgagagtggaggaagagtgctttaaacagctggaacagcaggtgcaaaggtcctgaggccggattgtgcctggggtgctccaggaacaacaaagaggccagtgtgtaggccgggcgcagtggctcatgcctgtaatcacagcactgtgggaggctgaggcaggcggatcacctgaggttaggagttcgagaccagcctgaacaacatggcgaaaccccgtctctactaaaaatacaaaaattagccgggcgtggtggtgggcgcctatagtcccagctactcgggaggctgaggcaggagaattgcttgaacccgggaggcagaggttgcagtgagccaagattgtgccattgcactccagcctgggcaacagagcaagactcactacaggcacccgccaccatgcccggctaattttagtatttttagtagagaccgggtttcgccgtgttggtcaggctggtctcggactcctgacctcaggtgatccgcccacttcagcctcccaaagtgctgggattgcaggagtgagccaccacgcccagccaagactccatctttaaaaaaaaaaaaaataggcctggcacagcagctcacacctgtaatcccaacacttcgggaggccaaggcaggcagatcacttgaggtcaggagttcaagaccagactggccaacatatagtgaaatcccatctctactaaaaaaatacaaaaattagctgggcgtggtggcgcacacctgtaatccctcctacttgggaagctgaggcaggagaatcacttgaacctggcaggcagaggttgcagtgagccaagaccgtgccactgcactccagcctggtcaacagagcaagactgtctctaaaaataaataaataaataaataaataaaggaattaattattattgatgaattacttcttgtgtgtccctggtatctccttaacagacagctacggcgtggacaagaagcggaaacgggggatgcccgacgtccttggggagctgaacagctctggtgtgtgccctctgcccctttccacccccatccccaggttctggggaggggacagctgaccccactgccctgtcccaccccaggctggggaggaagggctgtcggggaacaggggtcctcatctctgccttccctcagacccccatggcatcgagagcaaacggcggaagaaaaagccggccatcctggaccacttcctgcccaaccacggctcaggtgggtcccagctacacataagcccctgtcccctgggtgggcagagggtaagtggcagccctgcttttctggcctcttcacgccctccaagagcagccacaaggcgagtcactcagcacttagccagcaacatagagtagaaagaatgagggctttggagacagaatggaagttctgatctcttctgggccatttccttgctatgtgaacttcattaagttgttctacctctcagagcctcagggactcctttgaaaaggcccagtacatacttagctcagtggtgttttaaaatttgatctatttcttctttctttttttttttttttggagatggagtctcgctctgtcgcccagactgcagtgcagtggcatgatctcagctcactgcaacttctgcctcctgagttcaagcgattctcctgcttcaggctcccaagtagctgggactaaaggcatacaccaccacacctggctaatttttgtattttttagtagagacggtgttttaccacattggccaggctggtcctgaactcctgacctcaggtgatctgcttgcctcagcctcccaaagtgctgggattacaggcatgagccactgcatcccacctatgatcacatttaactgcatttacagcaaaacccaaaataacaggggcttcaacaggatagaacgttatttcttgtctcacatacatagtctgtagggactgaaagtggctcatgcctgtaatctcagcactttgggaggctgaggcaggtggactgcttcagtccaggagtttgagaccagcctggccaacgtggtaaaaccctgtttctactaaaaatacaaaaattagccgagtgtggtggtgcacacctgtagtcccagctacttggaggctgaggcagacaaatcacttgaacccaggaggtgaaggttgcagtgagccaagattgcaccactgcactttagcctgagcaacagaatgagacccttctcaaaacaacaacaacaacaacaacaaaacaggcctggcactgtggcttacgcctgtaatcccagcactttgggaggccaaggcaggtagatcacgaggtgaagagagagagaccatcctggccaacatggtgaaactccatctctactaaaaacacaaaaattagctggatgtggtggcacatgcctgtagtcccagctacttgggaggctgaggcaggagaatcatttgaacccaaaaggtggaggctgcagtgagccaagatggtgccactgtgttccagcctgtcaacagagcaagactccgtctcaaaaacaagaaacaaaaaacagtccataggtaggtgttccagggatggtctggtgactgcatgatcatcgagagaccgaggcttctgccattttcagttcgccaactcatggtgcaaggtggctgttgtagctccagccattacgcccacgttccagttagcagaccttagtcacatgatcacatcaggctgcaaggaaggctagaaaatagtcccttgtgtctctaaggtttgtcttgttccaaaaagagagtccctctttttttttgagatagtcttgccctgttgcctaggctggagtgcagtggcacaatctcagctcactgcaatgtccacctcccaggttcaagtgattctcctgcctcagcctcctgagtagctgggattacaggtgcccaccaccatgccctgctaatttttgtatttttgggagagaaggggtttcgccatgttggccgggctggtcttgaacttctgacctcaggtaatctgcccgcctcggcctgccaaagtgctgggattacaggcgtgagccaccatgcctggcctgagaatccctcttataatgaaactttttgatttgattgttattttttcttaagtccccattatgcctgagaatgacatttattttttctgacaattttgggactggtgacttcccaacttgtgtctcccatggtctggagatttcactttttgggttgtctctgtatgttggggggctttggaacctcttctcctttctcactctcagggaaaactctccacagctgtgtaggagcatggtttcaaccccagttccacaacagctgtgtgagccttccatttactttccctcagtgccttagtttacttattattaattatttttagagataaggtcttgctctgttgcccaggctggagtgcagtggtgtgatcatacttcgctgcagcctcaaactgggctcaagcaatcctcctgcctcagactgccaggtagctgggactacaggcgggcaccaccacacccagctaacttttaaataatttttttgtagagacagggtctcgtcacgttgtgctgggattacaggtgtgaaccaccacgcttggccttcaatttacttattatctgagaatggtgatagtcccacacggattctccttgggattaagagggcacctaaggccaggcttggtggctcacacctgtaatcccagcactttgggaggccgaagcaggtggatcacctgaggtcaggagttcgagaccagcctggcaaacatggtgaaaccccgtctctactaaaaagataagaattagctgggcatggcacatgcctggcctgtagttccagctactcaggagactgaggcaggggaatcaacttgaactggggaggcagaggttgcagtgagccaagagcacgtcattgcactccagccagggtgacagaatgagactccatctcagaaaaaaaaaaaaaaaggccaccttgatatcacattttgcagggagtagggcatttgatttagggcctgatcagaagttagccctaaatcacactacacttctcttgtcttcatccccgtaggcccgttcctcccgccgtcagccctgctgccagaccctgacttcttctctggcaccgtgtccctgcccggcctggagccccctggcgggcctgacctcctggacgatggctttgcctacgaccctacggcccccacactcttcaccatgctggacctgctgcccccggcaccgccacacgctagcgctgttgtgtgcagcggaggtgccggggccgtggttggggagacccccggccctgaaccactgacactggactcgtaccaggccccgggccccggggatggaggcaccgccagccttgtgggcagcaacatgttccccaatcattaccgcgaggcggcctttgggggcggcctcctatccccggggcctgaagccacgtagccccgcgatgccagaggaggggcactgggtggggagggaggtggaggagccgtgcaatcccaaccaggatgtctagcacccccatccccttggcccttcctcatgcttctgaagtggacatattcagccttggcgagaagctccgttgcacgggtttccccttgagcccattttacagatgaggaaactgagtccggagaggaaaagggacatggctcccgtgcactagcttgttacagctgcctctgtccccacatgtgggggcaccttctccagtaggattcggaaaagattgtacatatgggaggagggggcagattcctggccctccctccccagacttgaaggtggggggtaggttggttgttcagagtcttcccaataaagatgagtttttgagcctccggggtttcgtctgttctgggcttgggaaacgccctagtcccttagtagcaaagaaagcctccaggctgggggctcaggcctgtcatcccagcactttgggaggccaaagcaggaggatcgcttgagctcacgagtttgagaccagcctgggcaacatgacgaaacctagtctctacaaaaaatacaaaaattagccgggcgtggtgctgcgcgcctgtaatcccagctactctagaggctgaggtgggaggatcgcttgagcccaggaggtggacgttgcagtgagccaagaccgcaccactgcactccagcttgggcgacagcgcgaggctgtgtctcaaaaaaataaaaaatgaaaatgaaaataaaaaatgagaccgggcatggtggctcatggctgtaatcccagcactttgggaggccgaggcaggtggatcacctgaggtcaggagtttgagaccagcctaaccaaaatggtgaaaccccatctctactaaaaatacaaaaattagccgggcttggtggcgcgcgcttgtagtcccagctactcgggaggctgaggtgggagaatagctgaaacccaggaggcaaaggttgcagtgagcctagatcgcgccactgccttctagcctgggagacaaagagagactccgtctcaaaaaaataaaattaaataaataaataaaataaaaaagataaaaagataaagcatccaagctcttcccttctccgctctcccacttcttcctcgggatcccgcccctctcgactctaggacccgcctctctcgtcggcggaagtgcgctgcgcggccctccaccatgctccgccccctccccctagcgcggcctttcatttccgcttccggtgcgggccgcgcgcgagcgcagcggtgggaggcggcgaccagccggtgagtgcaggctgcggctcgacctcccggttttcgggcaggcctcagcccagcttctccctttcctcaggctctccccatgctgctgtgggcttctgctgcgtcccggccccgaggatcgctcgtccctcaccccattaggcctgacgggcctcaggccgagcccgtgccccggctgtgggccagaagttgccgcgtcgaactcggccttcggcccagcagcttatcacaggccccgcccccttgtcaaaaaaaaaaacaacaaaaaaaaaacccagcccaaatcctcaggccgcgacgcgatccacaagccccgtccaaaccttcggtctccgccctttcccgcaagccctgcccccaagctcagcccacgccctcctgtcagccagctccgcctctctcaggctctacgctctttttctttggatgctctccccaccccgccatctagatcccatctttagacctcagcttcactctggtctccttgcaacactccctccccgtgttcccactccctctagcatcttcatcttccgccacgcccttcacctgtcctcgacctccaccttcatacaactgcactgttcccttaaaagctttctccgatttcctccacctgccttcatccttattctccttatccctctaccacccagactcatacccaaccccacgcatggcccctagtgggagccttttcagttcttctctttctcttgagctccagccttaagtgctcagggtttgccttctgaccctacttcaaacactgctgatgtttcaaaacctttcattcccgactccagcgcgtggaatctaggacacccctttcccagtgatgctcacctcagaatcacctgagggtttttcagaatgcccaagcttctagatcgaagttgttagggatggacttgaacatctggcatactgttctgcagcttcacttctgctccctgaagctaagagatgtgttgtttgggatcgactctgccaccaacttgttagatgactttgattctgcccatacgggtttcacagaccatctgactttcctggtcccttcatccctcaggttgaggccccaggcttggcctcaccacaatgtggcacgaggctcggaagcatgagcggaagcttcgaggcatgatggtcgactacaagaagagggcggagcggagacgggagtattatgaaaagatcgtgagtaactggccttttgtctggggtgagggaccctgggttggggggcacagctggtcatcctggtaaaatctgggcttggaagtatgtcaagacaagaggctcatttcctcaggagtatattcattaatcttttcttgaggataatcattggtgggatcccaagggcttctgtttgttgtagcatactgtgtcgtttggtgtggcctcccagtgccgatccggtgttagcaagaaaaagggaagtctctgtaaccctcagagcagtcctgacgttagactggccacctccagaatgtctgtttcgcttattgctgtgttccccattcccagaagagctcagccactcttgagatttggcttggcacacaataggagtgagtattaagttggcctggcacagtggctcacgcctgtaatcccaagtggatcacctgaggtcacgagttcgagaccagcctggccaaaagggtgaaaccccatctctactaaagatacaaaaattagccaggcttagtggtgtgtgcatgtagtcccagctacttgggaggctgacgcacgagaattgcttgagcccgggaggaggaggctgtagtgcatggagattgtgccactgaactccagcctgggtgacagagcaagactcaacgcctgtaatcccagcactttgggaggccgaggtggacagatcacaaggtcaagagatcgagaccgtcctggctaacacggtgaaaccccatctctattaaaatacaaaaaattagccaggtgaggtggcgggtgcctgtagtcccagctactcgggaggctgaggcaggagaatggtgtgaaccggggaggggggcagagcggagcctgcagtgagctgagatagcaccattgcactccagcctgggcgacagcgagactctgtctcaaaaaaaaaaaaaaaaagactgtctcaaaaaaaaaggagtgaatattaagtgaaacctgaccacttccctctcctgtctgatgcttcagttgtttttgcggggaagaccaaactatccctggcctaaaagacccttgtggtctgaccactcagcttcatactcggacagctccactggccttctatttctgccaccacagggctttggcctatattaccccccctcacctatttaactcctgtgtatccttgggatcccagcttgaaatggcacctgttttctaggttcagtgttcctgtcagatgacatttatatagacctttcccagttattcctgtattactgccccagcctcctccctggtctgctggcctccagtcctggctcctccagtctgtccttcctagaagagtccaagaggcctttctaaagcacaaaactgaccctgtcccttcgttgctcagagcacctctatgcctcctaagtgcccttgagagaaagcccaggctcctcactgtggcctttagggtcctgcatggcctggcctttgcccttcctccagactcacaccaccccacactctgccttgttcctttgcacaagtcattttggcctccttgctattcctccactgacccaagcgctccccagccacaggacctttgtatgagctcttcccatacctggttaactactgcttatctgtcagatctcagtcctcagagaagtcttgtttcccaagctcagtcaggtgtcctctaaaaatgccataatcatagctccctttccttcccctttgtggaatttaacacacttaagatacacatacatgggcctggtgtggtggctcacgcctgtaatcccagcattttgggggccaaggcaggtggatcacctcaggtcaagagtttgagaccagcctggctaacatgatgaaacctcgtctctactaaaaatacagaaattagctggaggtggtgaggagcctgggctttctctcaagggcacttaggagccatagaggtgctctgagcaatgaagggacagggtcagttttgtgctttagaaaggcctcctggactcttctagggaggacagactggaggagccaggactggaggccagcagaccagggaagaggctggggcagtaatacaggagtaaatggtaatcccagctactcgggaggctgaggcaggagaattgcttgaacccgggaggcataggttgcattgctctccagcctgggcaacagagtgagactccatctcaaaaaaaaaatttatatatatatatatatgtgtgtgtatgtatgtatacacacacgcacacacatacgcatacacaggttgaacatccctaattcaaaatccgaaatgctccaaaatctttttttttttttgaggcagagtcttgcttagtcgcccaggctggagtgcagtggcatgatgtcagctcactgtaacgtccaccccccaggttcaagctattctcctgcctcactcaacctcctgagtagctggaattacaggcatgtgccactatgcctggctaatttttgcacttttggtagagacagggtttcaccatgttggtcaggctagtcttgaactcccgacctcaagtgatttgcttgcctcggcctcccaaagtgctgggattacaggcgtgagccaccacgcccggctagctccaaaatctgaaactttctgcatactgacatgatgccccactataagtggaaagtttcacatataagtactttacacaaactttgtttcatgcacaaaattatttaaaatattgtatacaattaccttcaggctgtgcttataaagtataaatgaatttggtctttggacttgggtgccatccctaagatatctcattatgaatagacaaatattccaaaatctgaaaaaatctgaagcacctctgatcccaagcacttcagataaggaatactttgtgtgtgtgtgtgtgtgtgtgtgtgtgtgtgtgtgtgtgtcccgtctctactacaaatacaaaaaattagctgggcgtggtggtgggcacctgtactcccagctactcgggaggctgaggcaggagaatggcatgaacccgggagacagagcttgcagtgagccgagatagtgccactgcactccagcctgggcgacagagcgagactccgtcccaaaaaaaaaaaaaaaaaaaaaaattttttccattcatacgtatatgcacatacccagctctgtgagactggggactaattatatttgggtcacgtttgtaccctagggttgggtccatcaaatatggtttgaaagaatagatgaataaaacaatattaacaatagtaattaaccatttaattgatccttcgcaggcacccccaggccatgtgagagatgcaggattttttttgaatccccacagtcacctgtgagacagagaccgctcttacttccactcagcagagaagaggaagctctgagagctccttgcttacctctgccacccaggaaggaaccacggggctaaagggagaactcatctccgatagtgtcagaaagatgtgatcatcaaggcaaggcctgggtctctgttggtcatagttgaggccccagaagtggcctaggaacacagcactcaggaatgaatagctaccttttttttttttgagatggagtctggctctgtcgcccaggctggagtgcagtggcacgatctcggctcagtgcaacctccgcctcccgggttcaagcaattctcctgccttagcctcccaagcagctgagactataggtgcccaccaccacgcccggctaatttttgtatttttagtagagacagggtttcaccatattggccaggctggtctcaaactcctgactgcaagtgatccgcctgccttggcttcccaaagcgctgggattataggcgtgagccaccacacccagcctagctgccatttattaagggcccatggtgcgccagacccagtgctcaccagcttggcatagtagtcctctgaacaggcctgcgaggtaggtattgatcatgcctgtgttaaaggtgatgccacgataacagctaacgctgttgggcagttctgtggtaaccactgtgctaactacttggcttgtgtctccgcttcatcaaagccacacccaagactaggaggtggttcttactatttccattttacagaggacaaaactggagcacggagatacgtggcttacagtcacatagcatgagggcagagctggcactataacccagtctctgacccttaacctctctaagcttttcacctgcgccttatcatgcagaaatagaggttcaaaaagatgaggcatagcaagaccccatctctgcaaaaaataataaaaaaaaattagccaggtttggtggcatgcgcctgtggtcccagctacttgggaggctgaggcaagatgagacctgggagggtggggctacagtgagctgtgattgcaccactgcactggaacctgggtgacagagtgagaccctgtctcaaaaaagaaaggtgaggtgacttgcccaaggcaacacagccaggaggtgagatcccatcatggttagtccttagaatttgggagtcatggggctctgggttcaaattctagcgatcccacttatctatagtgtgacgtgggcaagtgactgcctccctgagcccatttcctcttccacatgtgaaaggatgtcacatggacaatcagctttggctctaacaaacctagagcatccgtcagtggcttaaacaagatagatgtttatttcttagccacagaaaagccaagaggtaaccagttagctcggggacctaagccgcttctgttttgttctcctgggcacagcttctcttcctagtgttgcatcgaggtctaagaggctctggccatcatgtcttcattctatccagcagggaggaaaaagggaggaaaaggggcaaagcgctcatgccatttgttgagaaagtttctaggccaggtgcagtggctcacgcctgtaatcccagcacttcgggaggccgaggcaggaggactgcttgagcccaggagttcgagaacagcctggacaacatggtgaaaccccgtctataccaaaatatacaaaaattagccgggcatgatggcgtgcatctgtggtcccagctcctcaagaggctgaggtgggagaatctcttgaacccaggaggtggaggctgcagtgagctgtgattgtaccactgcactccagcctgagtgggagaataagaccctgtctttaaaaaaaaagtttcgggatgttttcccgtaacatttccactcctcccctgctgaccaggaagtagtcttatgaacagccgtgaggaaggctaagaggtgtagactttattttgggtcgccctgaccagatatatttggagttctgttactgttgtagcaaagggaatagatgttggttgccaattaatggtttgccactaacagtggagacaagagcatgtccttcgatgttgttggagtgttggacacatggaccactgagagcagcctggccagcgtcgctatcgctcagtaaatattagctcttgttattgacattactgttgctgatagaactggagtttggatccaggtggagggatggtgcagaggaaggaaggctggagctgagactccaggccccctccctgttagcagggaagcttgctgcattgtattccccctcaggacagtggtgacgaccaacccctctcactggataatggggaagagctcaaagaaccaatgtctatgggtgctttgtggtgcaggcctgtacaagcggcctttgtccctgtatgtgaacgtgacctgcattccgatctgggctgccaagctgtggagtatggctgggccgtggctgatggctgctttgaggaggggactctcatctcagccttgggccgagagcagaggctgtggagcgagtgtcagtgaagctgcggtagattgtggcaggctgaatgagtatgtccagatgcagttggtttctgtcttcctgatttgtcgttggtgcctgctttctctccctgtcttcagtcccaagcagactccggttctgtcattgcttctgtccttgtcaactttcctttttaatcagtggtttggataaagaaacagaatcctctgttgatacggaaataagaagtaaacaggtcgcagctcaggcgtcgcctcctccaggaagctccagactgacccccaagtctgggtcaggtgttccccctgtgggcccccatctcagcgctgtccactctaggttgtccttgtatggggacaagtctgtgtcccacactggactgtgagcccatgagggcagggccagggctatctcagttactgccataccctagcacaaggtctgcttaacagttgaatgaatgaatgaatgaatgagtaacttcatgaactcctctgacacaatctgatcctagagacaggataatccagtggttaagagttggttttgggccgggcgcggtagctcacgcctgtaatcccaacactttgggaggctgaggtgagcagatcacctgaggtcaggagtttgagaccagcctgaccaacatggagaaacgtcatctctactaaaaatacaaaattagctgggcgttgtggcacatgcctgcagttccagctacctgggaggctgaggcaggagaatcgcttgaacccgggaggcagagattgtggttagcctagatcacgccattgcagcccagcctggacaacaagagcaaaactctgtctccaaaaaaaaaagtggattttggatcttgaagaggtacttatacacttatgttcattacagcattattagcaatagccaagaggtggacgcaagctaaatgtccattgagggatacatcgagaaagaaaatgtggtctctacacataacgcaatattattcaatcttaaaaaagaaagaaatcctgtcctatgctacaatatcgatgagccctgaagatgttatgctaagtgaaataagccagtcgcaaaaagacagtattgtatgatccgctgataagtatctaaaatagttaaaccttgcttgagcccaggagttccaggctgcagtgaactgtgatcacaccactgtactccagcctgggtgacagagcaagactccatctcaaaaaaaaaaaaaaaaaaaacagagagagagaggaagggaggaagggagctcacttcggcagcacatatactaaaattggaacgatacggggattagcatggccactgtgcaaggatgacacaaaaattcgtgaaaccttctgtatttttggtaaagaaaaaaaaacctaaaagaaaagtcaaaccctcagaaaaagaaaatacagtgcaggttgacagggatggggggaggaggaaaggggaagttcagttttgtttcagttttgtaagatttaaaaagttctaaagctctgttgcaccacagggtggatgtagttactactactgtactgtacacttaaaaatgttaagatggtaaatgttttctaccacaataaaaaaattattcttggccagatgtggtggctcacacctgtaatcccagcattttgggtggctgaggcaggcagatcacctgaggtcaggagttgaagaccagcctggccaacgtggtgaaatcccatctctactaaaaatacaaaaaattagccaggcaggttggtgcatgcctgtactcgggaggctgaggcaggagaatcgcttgaacctgggaggcggaggttgcagtgagccgagatcatgccattgcactccagcctgggcaacaagagtgaaactcttgtctcaaaacaaacaaacaaaaaattactcttaaaaagcaaataaataaaaagaagcagattttgtagtcaggcccatctgggttcaaatcctagttctgcttattcctaatgtcaggcaggtggaccccatggctttgagcctcagtttactcatctgtaacatgggcataagaatagtacctgctgggcgtggtggctcatgcctgtaatcccagcactttgggaggccgaggcgggtggatcacgaggtcaggagttcgagaccagcctggccaacatggtgaaatcccgtctctactaaaaatacaaaaaattagccaggcattttggtgcatgcctgtactcgggaggctgaggcaggagaatcgcttgaacctgggaggcggaggttgcagtgagccgagatcatgccattgcactccagcctgggcaacaagagtgaaactcttgtctcaaaacagacaaacaaaaaattactcttaaaaagcaaataaataaaaagaagcagattttgtagccaggcccatctgggtttgaatcctagttctgcttattcctaatgtcaggcaggtggaccccatggctttgagcctcagtttactcatctgtaacatgggcataagaatagtaccagctgggcgtggtggctcatgcctgtaatcccagcactttgggaggccgaggcaggcggatcacgaggtcaggagttagcgaccagcctggccaacatggtgaagccctgtctctactaaaaataccaaaattagccaagcgtggtggcgggcacctgtaatcccagctactcgggaagctgaggcaggagaatcccttgaacttgggaggcagaggttgcagtgagccgagatcgcgccattgcactccagcctgggtgacagagcgagactctgtttcaaaaaaagaaaaagaatagtatgtttcttccatggttgggacattcgagtgagacagtgcacataaaacagtgcctggtttttagtagggttcattgacttttccagaatctcccaacagaaccaggctctggactcctggtgtttactcccggctcagtgcttattcctttctgtgaagctgaccctgccagtagcttccctgtacctgccaaattctgtcctgcaaacagtgtcccatgagtcctggctgtgggaactgggcatttggcctggagcagcctcaggagtatgatgggatcttggccttggacttggctggcttgtcccagggcagagggagctgggtgcgctgtgtggccccagctgaggaatcagctaaggaatcgagggaggcaggcgaggtgcagcatgagtagctggactccagcagcgccacctcgctgggcctgtggtcttgagtgttccttagactcagtttctttaggtgtgaaatgagagtcacagcagcccagcacctggcacatagtgagtgcggggttgaaactagccaggtattagctgtggtcctggtgagtgactcagctccttcagcccggactgcaccttctcatctgctggctgagggctgagatggagacagagtgaggatgtgcaggagcttggaaacttggagctggtgtttttttcctgaaggggctcagagtcttcatctgttagtaaggattattcctgtctttccttcattgggtgttctcaagcgcctgctgtgggccaggccctgttctaggctttagggatatagcagccaaaacagagccctgcctcctgggagttacgttctaacatgggagaaaggtgatgaatgaatattaggtccagtggcaggtggtagcgggtgctcaaaagaaaacaagtggagttaagtgagtgaattgtgtggtatatgaattacttctcaataaagccacagagtgaaggagctggggtagataagtggggagctatttagatagagtcactgaggacggcttttaggaggagatctgaaataagcgggggagcagaagcacagaggtccgagcagaagcacggggcatgtctggaatgcccaaggaatggcgtgaggcgagggcctgtgtgcctggagcagagtaggggagggaagaaatcagagagggacaggccagcacctgtgagggctgagtggttgggagtggggtggggggtggggtgcggcccaacatgtgtcagcaaatctcctggaggcagagcccagcctggaccagactgcatccacacattgaaagatgaccaacatcattagccatcagggaaatgccagtcagaaccacaagataccacttcacccacactaggctggctgacatggaaaggacagactataacaagtagtaggccaggcatagtggctcatgcctgtaatcccagcactttgggaggccaaggcaggcggatcacctgaggtcgagagttcaagaccagccagaccaacatggagaaaccccatctctactaaaaatacaaaattagctgggcatggtggcgcatgcctgtaatcccagctactcaggaggctgaggcaggagaatcgcttgaacctgggaggtggaggttgcagtgagctgatatcgcaccattgcactccagttgaagatcctgatttctctatattcttgtcactacttgtgttttgttttgttttgttttgttttttgtttttggagatggagtctcgctcttgtcccccaggctggagtgcactggtgggatctctgcttattgcaacctacctccacctcctgggttcaagcgattctcttgcctcagcctcccaaatagctgggattacaggcgcctgccaccatggctggctaatttttttgtatttttagtagagacagggtttcaccatgttggccaggctggtctcgaactcctgacctcaggtgatccgcctgcctcggcctcccaaagtgctgggattaccggcgtgagccactatgcccgacccactgcttgttacagtctgtcctttccatgtcagccagcctagtgtgggtgaagtggtatcttgtggttctgattggcatttccctgatggctaatgatgttggtcatcttcccatgtgcggatgcagtctggtccaggctgaagtgtccacaccagtctctaaatgaacggcccggaggatgggaggtgaagagttaagggggctgatattttagagagcgaggtcttcgtactggctatgcagaagattgagccaccacctcgagaggaaccaatagcttatttcttcaatttctttttttttctctttttgagatggagtcttgctctgttgcccaggctagagtgcggtgacacaatctcagctcactgcaacttctgcctcccaggttcaagcgattctcctgcctcaggctcccaagtagctgggattacaggcatgtgtcaccacgcccagctaattttttgtatttttagtagagcctgggtttcgccatgttggtctggaactcctgacttcagatgacctgcctgccttggcctcccaaagtgttgagattacaggcgtgagccaccatgcctagccaattcccttatttctgaaggttagcaggttggttcacctctgaggtatggcccacttgaccttagaagtgagcttgctgcaggccgggcgcggtgactcatgcctgtaatcccagcactttgggaggctgaggcgggtggatcacgaggtaaggagatcgagaccatcctggctaacacagtgaaaccctgtctctactaaaaacacaaaaaattagtcgggcatggtggcgggcgcctgtagtcccagctactcagaaagctgaggcaggagaatggcgtgaacctgggaagcagagcttgcagtgagccgagacagcaccattgcactccagcctgggcgacagagtgaggctccatctcaaaaaaaaaaagaagtgagcttgctgctaagctcggttgtgtgtgagggggtggggtttggagctctgttgggtggtgacctcagtcctgtttacccctgcagaagaaggacccagcccagttcctgcaggtacatggccgagcttgcaaggtgcacctggattctgcagtcgccctggccgctgagagccctgttaatatgtaagactgatatggaaggcaggggagtgtctgaagtctgggagtcaaaacggacctggggtggtgtagagtgtggagcagagactgaagtatggacagacctttggggactcagaggcagggaaggtgtgacccgcatatgaaggtgatagtcacagggtgtaagaacaatgagcaggggttggggtggaggccccagagtagcagtcatggttggaggacttagaaatgggtggagccagggccagaggcccagaggaagcagagagtaggttgccagacccgagctggctcagggtgcctggggcccgcccctcaaataccctctaggacctggttcaagttccccactattgcttggttgtgagaaatggggccctggtgtccccaggggcagtcagatgactggcctgtttcaggtcccaggagcctgaatgtggattcagggaggcttgcaacagaagggactgagagctgggggttgaggtgagggtcatggcatggggaccaaagcaggctgagggccaggcttctaagcctcagctggcagggagcaggtgctttgtgtcctgggcagtatggaccctgaggttcttgctttcttgctcccctcccacttcaggatgccctggcagggggacaccaacaacatgattgaccgattcgatgtccgtgcccacctggaccacatccccgactacaccccccctctgctcaccaccatgtaagccacctcccagggggttgccaggcacagcgtcatacccaggagcccctgttcttttcccagcctacctgtcaccttcctaggagccgttcctatttggtaccgccctgagcctgagggggatgcctcatttcccttcctgctggcttggggggggatccactccttctctctgatttcaaggtctcgcccttccctaaagctccccagaacaggagtcggacgaacggaagtgtaactacgagcgctacagaggcctggtgcagaacgactttgccggcagtgagtgatctgtggggggacgtggggtgtggggtttgagcctggagcctggaagacctagataggtttgggaagaaaagttttatccacatactttctactaaagggccttgggttccggctccagctctacgatagactcactttgcctgcatctctttccccttctagatttggtataggggatgtctgccgaatgggttgttcccagcagagtcacgtccatataccatgccttctgactctgtggtccgtttttctttaaaaaatagagaaaatagcaagaatatgtttttatttttatttatttatttatttgaggcggagtttcgttcttgttgcccaggctggagtgcagtggtgtgatctcagctcactgcaacctctgcctcctgggttcaagtgattatcctgcctcagcctcctgagtagctgggattacaggtgcccgccaccacccccagttagttttttgtatttttagtagagacggggtttcgccatattggccaggctggtctcgaactcttgacctcaggtgatctgctcaccttggcctcccaaagtgctggattacaggtgtgagccaccacgcccagccaagaatacgtttttaaaagcatttagaaagatggggtctcactgtgttgtccaggctggtctgaactcctgggctcaagtgatcctcctgccttggcctcccaaattgctgggattatagacatgaaacactatgcccagccaggaacagattttttacctctgtgtattttactctgcccgcacagatcagattgtgagctctaaaaaggaaatttctccttgatttaaatgaatatttgccagcatttgacaatttgccaagtgttcatgtatgtccaggaattttctcccagcccagccttatcaccattgtcattttccaaatgaggaaacagaggctcagggaaacttctcgctgctctgggcttgcccagggaggtttggatcccaacagacttgggcttttttgtctgtattatcattacatctgcacaaccacctagcaaggtaggggtgacaccccgttttggggttttttgttttttttgagattgagtcttactctgttgcccaggctggcatgcagtggcgcaatctcagctcactgcaacctccacctcctgggttcaagtgattctcctgcctcagcctcccaagtagctgggattaccggcgcatgccaccatgcccggctaagttttgtagttttagtagagacggggatttcaccatcttggccaggctggtcttgaactcctgacctcgtgatccacccgcctcggcctcccaaagtgctgggattacaggcgtgagccaccgcgcctggccatcaccccatgttacagacaagaatgtcgagggggaacaccctgtccaaggagctgggattctccacgtgtccttaaccactgctccctgttgatggaaagctcctaactcacctaccaagaaggacttgagattccctttcttgggattccctgtggagttaagggaaggatggagttctctgctgggtttgtcccttaccacctggcaggtctcggcttcctcctcgagaagggtggtggtgttgattttgttgcgtggggtggttgtaagagttgagtgagatgatgtgtataaaaccccagcaccgagcctggcacagtcagccctccatgtgggtttgctagtccagtatttgtttatttctaagatagatgcttttttgattttctaaaatcagaggctgccaaaattctagtgatcactgaggccttagaatcagggacatgtgttataattgatactgtttttgccatcattccaggccacatggcttcctggtggtagagccagggttccccttagtttcgcctcactctgcatttattcattcacttccacaaacagtcattgaacacctgcggtgtggcaatggtaggggagagggcagcagctccataatcaatgtcagtgatgccaattgcaaaccaaggtgatgtgacagacagtgtgccattctctgagaaaaataggacagaagtcctggatagaagctccctgggaggcacggataggccacaggattccaggccgagagcagcctgtgcaaagccctgtgtcagccaggactgtgagcacactggaggggcagagagaaggcccgtgtggctggagcagggagagcgagggcgcttgtgcaagacagggtcagcagggcctctcttgggctttggagacaacaagtagaaattggggtatctgctagaacaaggaagggccgtgctacatccccttctggcctgccagcctgcccacctcttgttccagatagaaaagctgaggccagccgggcacggtggctcatgcatataatctcagcactttgggaggttgaggcggtggatcacctgaggtcgggagttcgagaccagcctgaccaatatggagaaaccctgtctgtactaaaagtacaaaattagccaggcacggtggcgcctgcctgtaatcccagctactggggaggctgaggcaggagaatcgcttgaacctgggaggcggaggttgcggtgagccaagatcgcgccattgcactccagcctgtgcaacaagagtgaaactctgtcttaaaaaaataagaaaagaaaaactgaggcctagggagggaaggaaggaaggggacttacaacccactgtcccacagcgagtcagggacacgtgtctcactgcagggaagatcaggaaggctctggtacattgttgagtcccccaggctgggtgttgggggtgcaggagagcccaggtcatcccagcccacacctaacttaaaatgagccacagagaggcatgcagtggagtgacctgtgcagtcagaatggcgtgtggcactcaggagcaggttatggttctgaagggtccagccagaggcctccagaaacagtgagaatggtggtagagtgcccaagtaccaggccaggcactcactctgcccgtggtcccattttacggaaaaggaaactgaggcacagatgtgttaagtcccttgaccaaggtcgtgtgtccaaggctctgctgcagttgcttgtgtcccaccagacatagtttgattatctggaagtggtgactgccccccaaggtgcactggggttgcacctgtcttcctgccccaccgcacccttgtgttcccccactgaattcctagtgtccccaacccactctgacctggggtctcttgtttgctgcagtctcagaggagcagtgcctgtaccagatctacattgatgagttgtacggaggcctccagagacccagcgaagatgagaagaagaagtgagtcggggtctggggtgcagggggttgaggaggcaggagggctgggagccccagccaggcatggcctcttccatcctgtccaccagggtctccccgaaaccaaggatggtgttcagcacacagtcagtgctcaattaataactgtgtagaggaagaagccctgtcagggggccccggcttgccgagggctctgcgttacattttcagcttgggaagtggtgggaggtgcaggccctgtggtgagacagccctgggtttgagtcctggctgtgaggccctgagtgggaattgtctgagccttgctgtgcttccctgtaaaatggggctggcaggaggccctactgcctggagttgggaggcatgcaggagatggggcttgtgaagtacctattccagcacctgccatgtagtgagcttgcagtcagccctagctgatgtcactctggagagaggcttcttaaagccgcgtccctcaaggagtagctggggagacccgggccttatcctggagcagctgcctctgaggagcagtggccgagcagtctcacttctctcttctccacctcagtctgatgagtgcaggcctcccgccctcacacacgctattccctctgcagggcttagctctcctccaggccagctgctgttgccctggtgcacggtagcctggagccctggctcggggctgggcagctccctcagtgacaccttccctcctgctacccctgactgcttgccgccttcctccactgggaggggtcccatgggactgtactgggagcttcttggagacttcagccctcgtccacggccccagcctcaggatcctgctcaggccctgctctgttcagggcaaagctggggcacctggctgctcaggaggactctgggctgtgcccttgtgggactcatggtctaggcgggagacagaccttccccaacagagatgacccaacaaaggcagggctggggagctcaggacagtgctgacccaccctagggtaccagtcaaggacttcttggcaggtggggccctagagctcagatgtggaggaagagggaggagctgggtgtgggcaggagcagagggtcctaggctgagggagagcctgaggggagggggccgtggcactcgagactggtgtgtggggctagcctggggccctcatctccactgggcacggccctggcttaccagctcccctttctcaggctggcagagaagaaggcttccatcggttatacctacgaggacagcacggtggccaaggtagagaaggcggcagaaaagccagaggaggaggagtcagcggccgaggaggagagcaactcggacgaagatgaggtcatccccgacatcggtggggtcccctctctgccctccccacctgcagtccctgggcatcgtttctgtgtctcgtccctcaccctctgtggggcaccccgtgcttacgaaccgtgtctctctccctaccccgccccagggcacaccagcctcctgctgcccctgtctcactcctgtcctcctccgttccggccttcctctgcctcactcatctctcatttctagggtgctatttctatgatcttttcccctcctaggtgttggctccattctcctccacttgggccggcctctctctgcctttgcccctctctcctgctctcttccctcctctggaaaacaagtgttcatcctcttacagagtcagcccccatccgccaggcatctgttcaccctcctctctgccattcacctcccctctggattcccactgatcaaaccacccccaagtctctctgtttttctcatcctggttcttactccagcaactggctctttttatttatttatttatttatttttgagatggagtcttgctctgttaccgggctggagtgcagtggcatgatcttggctcactgcaacctccacctcctgggttcaagtgattctcctgcctcagcttcccaagtagctgagactaaaggcacacgccaccacgcccagctaatttttgtacttttagtagagacgggggtttcaccatattggtcaggctggtcttgaactcctgacctcgtgatccacttgcctcggcctcccaaagtgctgggattacagacgtgagccaccgcgctcagcccagtagctggctctttattcacactctgtggagccacacattgacctccgcccagccctccttcctctggcttatcacacgccctgcttccaaacacctgtgacccacaccctgcctgccacccaccgtgatctccagccgccatctttccgcccctgttcagtcctccctctcacgtcaaccccaccacacgcctcactcatccattcctccctccctccatccacccatccctccttccttccttgcctccattccattcatccatccatccatccctgcatcccttcatccatccctgcacccatccgtccatctctcccttctctttccctccctccgttcatctgccccttcaagccctgtccccgagctgcctctgtccactgtgtgttgtgctcacctctggcaagcccagtgccagcctagggcatgccaagatgagccagacttgatgccatcccttcctgaagaatccctcagtctggcgggcgccccatcatccccgcctcctggagcactgccccttctcccctgtcctctcgctcggccgtggctcctgacagcctttctcttggtgcagacgtggaggtggacgtggatgaattgaaccaggagcaggtggcagatctcaacaaacaggccacgacttatggcatggccgacggtgacttcgtcaggtgaggcctgcctgctgacacccctacccattctgtgggccccaccctggcatctcactattactcccggtattgacagccatcctgtttgtgagcatttgtgtgcctggccctgggcccaggactttacacatgcaggtccctgagcctatggtggtcgtggccccacttcatctgtgcagaaacaggctgcacccaagtcacccagcctgccctacttagtgcgacctggggcgaatctgactcttcgaagctctggggattcctaggctgggggacagcgccctctagtggagaggcttcattccctggttatttatcctggcagttgctggttgtacctctaccctgagccacaccccctgctgagctcacaagaccacacagaatggtcccagctcactgggcagtgaaccagaaacggagcctgagcatggcaccctctgcccagagccctttgtggctcccacctccctcaggaacatccagtgtcctcaccatggccgaaaggtcttacccatctggtcctctcaaccgccaccatcccccgctgcccagcctgcacagtctccttgctcctcaagtgcagaggcctgggccagcccctgggccactctgtctgctgttcgctttggacgtctgcagcttgctcccccaggtttttctctagataccctgttttgtgtggcttccctgagctccctcttgaaaactgcagcttcctctgcctttgctctaccatctaatggaccacacattttattcccttgctcattatcttctcccctagaatgtaagcccgtgcaggtgaggatttctgtttttttttttcagtgctcagttcttgatacctaagatagcacctggcacacagagggtgcttgataagtggcattgaatgaaagatacctcaggctggcgtggggtgactcaggtccctcactttctctgatgactcagtctgtgtcctccttaccctgtggcctgccccatcctccaccctaattctcacccacctctataggatgctccggaaagacaaggaggaggcagaggccatcaagcatgccaaggctcttgaggaggagaaggccatgtactcggtgaggtctgggctggagtggaaggggacaggggtgtgtcacagggagggcaccccctcaccaacctggcacccaccctactccagggacgccgctctcgacgccagcggagagagtttcgggagaagcggctgaggggtcgcaagatcagcccacccaggtagggcttctccctgaacccccaccctgctggcatctgggggaggagagcaggggcttagggcctgagaaagctctttggaggcaggcatttgacttgagaaaggagtctttctagtggggcgatgcatggccatcgtgaaggtttagaggtaggaacggccttgagggccatgtggactcctttccttgccagcccctcccctcaccctactggactgggggcccttgccagactcccaggagcccatgcacaggcggcataaggctctcaccaaggcggcagagagggcacaggctttgccctggactctcacccagttctgctgcttggcttcttcctgtgtcggagtttggacaagtgacttcccgaactctctgagcttcaattttttcctttggaaaacaaggcattatcacctacctggagagagggctgggcagtccccacagggaggtcttgggacaggtttggatgaggcaggctggcttggagaggaaagcccagcctgggtcaggaggccttgaggagaggccctgtgcaaacccatgcctctttttgccacatctcttaaaggagagtgactgagagttcctgtaaggcttaaacaacttgtaggttcagcggttggtatcggaaacattccttaaagaatagcaccaatcgtcattgctgtcagcggtggcacagaggcacacagagggtagtgcaggaacgcccaggctgggtggccatagggcctgggtttggatcccagtttcctcctttatgagctacgtaatgctggacaagtgacttcacctctctgggcctcagtttcctcagctgtgatagtctctcttttttttttcttcccccagagacagggtcttattctgtcacccaggctggagtgcagtggtgtaatcacgactcactgcagcctcaaattcctaggcttaggcgatcctcctacctcagtctccttagtagctgagattactggtatgcgtcaccacgcccagctaattaaaataaaaaatacttagtagagatggggttttgcggtgttgcccaggctggtctcaaactcctgggttcaagtgatcctcccacctcagcctcccagagtgctgggattacaggcgtgagccaccgcacccagcctattttaatcttatcatcatcatcatcatcatcatcattagtaagcccggacccagtgagagccagagacaaggattgggaggagggatgctttcattctagggtcaggaggccaagcagaaccagagctgctgaagtccaagttcctcagagtcatgatgggtctaggacattgtagggtggggcttaagttcatgctttggacagatctgaggtgggggtgggtggaggaattaaggggaggcccccaacctggtcagcagccccctcactgtgccaggtacctagctttgggtcctcaggttggcgggcttatcccaaattcatgactgctgagatcttaagccctaatttgtcccaccccattcttttctctgtagctatgcccgccgagacagccccacctatgacccctataagcggtaagttgctctggaggaccagggaatagcagacagggagcctcctgatggggacaggggtgctgaggaggggatgggaggttcaccctgctaggccaccccaagatcacagactgcatgatatgttctgggtctgaatcatttttgtgttttccagatcactgtcttgttttcccagttttaaataaaattttttttttgagacggagtctcgctatgtcgcccaggctggagtgcagtggcacgatcttggctcactacaagctccgcctcccaggttcacgccattctcctgcctcagcctcctgagtagctgggactacaggtgcccgccaccaggcctggctaattttttgtatttttagtagagtttagtagggtttcaccgtgttagccaggatggtctcaatctcctgacctcgtgatccacccacctcagcctcccaaagtgctgggattacaggcgtgagccaccacgcccggccaataaaattttctttatctttgaagcttctttattttatttttctgatttaaatacagtgcagccttgtggtaaaaatgaccaaatatggcaaaacagtgtgactgagaaatcaagtcactttaatctcaatttccagaagtggccagtgggaaataacgggcactcagtagcaccgctgggcacaggtcgttgtctcgtggatgaaagagtggttggagaagggattttgtgagggaccaagctcagtctgatcccagtccccctcatccaagctccatagctctctgaagcccagttccctcttcggaatgggggtgggaatgggatcttcctcatggggctgtgggtcgaggttagatgagataaggtgttgaatggcttctggggaaataaaaggtgtaggttagtgctccatacatgggagtgtcaggaatatcagatactttctttttatttttaaaattttatatattaaaaaacacgtttgttttttttttctttaaaatattgagatggggctcaccatgttgaccaggctggttttgaagttctggcctcaagcagtcctcccacctgggccttccaaagtgctgggattacaggcatgagccatcacacctggccactttgtttttattttactaaaatagaattgcaccacactcagtgttttagaacttgctttttcctcccagattatccatgtatcttttgagtaaaacttttctgtgttttgtacagagatctgcttatctttttttttttttttttttttttttttgagacggagtctcactctgttgcccaagctggtgtgcagtggcgtgacctggactcactgcaacctctgcctcccaggttcaagcagttctcgtgccctcagcctcctgagtagctggaattacaggtgcgcgccaccatgctcggcaaattttttttgtattttttgtagagacagggttttgccttgttggccaggctggtctcaaactcctggtctcaagtgatcggcctgcctcggcctcccacagtgctgggattacaggtgtgagccaccgcgcccggcctgctcatccatttttcatagccacataaaatcagagcagttgtgtgtcattgtccttcctggttatttagcgaaggctgcatggttgtgagtcaagtccttgtccagagctgggtctccactgccctccaggctccatccacccgcctggtttcccgggtcgctgtggcccgcgctggcgctgctgttgatctgctgtgtgtgctgttcccgaagaggctccgggagcctgagctagtgagcctcctcctccctacccgcaggtcaccctcggagtccagctcagagtcccgctcccgctcccgctccccgaccccgggccgcgaggagaagatcacgttcatcaccagttttgggggcagcgatgaggaggcagccgcagccgctgctgccgcagcagcatcaggagtcaccacagggaagccccccgcacctccccagcctggcggccccgccccgggacgtaatgccagcgcccggtcggtaacgctcacgccgcccgccctacgccccggtcaccatggggggtacccggggcagaggggggccgcggctcaggcctgcgctgaccggccctccgtgccccgcctgcagccgccgctcctcctcctcctcctcctcctcttctgcctcgaggacctccagctcccgctccagctctcgctccagctcccgctctcgccgtggtgggggctactaccgttccggccgccacgcccgctcccggtcccgctcctggtcccgctcccgctcccgctcccggcgctattcccggtcccgtagccgtggccggcggcactcaggtgggggctcccgagacggacaccggtactcccgctcgcccgcccggcgtggtggttacgggccccggcgcagaagcaggtgtgtgtggctgggcgtggaggtgggaggggctgggggggcgcggtctccgatcctggggagaaggtgctcagagggaggaaacctggccgtccagctcagagaacaccccatctaaggggacaggcacaggccactgctcttccgcaggaagcccttggttggaaagggcaaggcatgggtgtttgcgtgcgcgttctggtggcagtggaggtggatcccagccgctgttttccacgacagggtgtggagaggagactgtgcatctctctctcctcaggagactgtttttgctgtcaggggttccaggtggaggggagtagaaagcgcatggacgctccagggttttctgtagcttgaagggacgggtccgggccttgagggctgggaaaccccttgcggagggggaggggcgcgttcctgtgtggccaggagcggatggggaagcgaagcgggtggaaaaaatcaagacagctctttggcctggcgtggtggctcacacctgtaatcccagcactttgggaggccgaggcaggcggatctcctgagctcaggagttcgagaccaccctgggcaacatggtgaaaccccgtctctactgaaaaaaaaattagctgggtgtggtggcacacgcctgtagtcccagctacttgagaggctgaggcaggagaatcgcttgaaaccgggaagcagaggttgcaatgagctgaaatcgtgccaccgcactctagcctggtgacagagtgagattccgtctcaaaaaaaaaaaaaaaaaaaaaaattagctgggcgtggtggcacgcgcatgtagtcccagctatgcaggaggctgaggcacgagaatcgtttcagccccgcaggcggaggttgcagtgagccgagattgtgccactgcaccccagcttgggctacagagtgagactgcgtctcaagaaaaaaaaaaaaaaaagacatttcattttggagacgacatggtgagaggctagctctagggatggtttagaaaataaagtcacctggggactggtccacccccttccggtccccttgcctgttggggtcagggctgccctgggaagggcagcgacgctgggttggtaggagcatagactgcagggcacctgcctgagtgtagagtccctgggcctctaattctgtaaaatcgcggtaatagcatccgcttctctgagctgttagaggtgtaacaggtaaacccatgtaaggtgcttaggacagggctggtgctggctaagtgccgttaatatcgtcagcatcattacctgcgttattgtagcactgatcgccatgtcagctgccttcagggtctggcaggtaaagtagaggggccaggtagagatcctgctgacctggcaagcacatgttccctccagtcggggcgttgaccgctcagcagcaggtctagtgtcacccagtctttctagttctcaggagaagttgagggtctggatttttagaggatagctcttgtttcctttacttttttttttgagacagagtctcactgtgtcactcaggctggagtgcagtggcacaatctcggctcactgcacctcctcctcctgggttcaagtgattctcccgccgcagcctcccaagtagctgggattacaggcatgcgccaccacacctggctaatttttgtatttctagtagagacggggtttcactgtgttggccaggctggtcttgaactcctgacctcatgatccacccacctttgcctcccaaagtgctgggattacaggcgtgagccaccgcgcctggcccttgttttcttaataatgacaacaaatttttattttataaaaacgcaattcaaaaattagccgggtgtggttgtgcacatctgtaatcccagctattcaggaggctgaggcaggagaattgcttgaacccaggaggcagaggttgcagtgagcccagctattgcaccactgcactccagcctgggcgacagagagagactgtctcaaaaaaaaaaaaaaaaaaaaaaaaaagagcccaagcagagtcagcgtgtggcccagaattggcttccaggtcatatattccttgtagcttacccagagcaatgacaggagaaaggcttgggggacaggtgggacctgggcacatcttgcatgccagcctgagagtgggcagtgggtggagagtcccaccagtgtcctgagcagggagaggatggggttccgcatccccagactggaacttgtgggtctgtgctgagactggtggaggacaaggggtggtccccactattgtcgagaccctggacacaagcaggatgaggtggtgggtgagggtgtagatgaggtcaccgtggaacactgttgtgcctgagctggacacggctcataaagggggagccagccatccctcccagagctcacctcccgggaagttagcaagcgggtgtctagtgagggagaggtgacgtgggccaggcagggctcatgatggcaggactgcccttaggctgagtgtatctagagcgccatctctgtagccggagggaggccggaatgccgctctgggacattttggagggagagtagcaggagaggagagtcgagcctgtcaccctgggccttgcaggaaggaggactgtggatccggacccagggtggggtgcggttggggtccctggagcctcacagtcctcctcccgccctgctgcatccccaggagccgctcccactcaggggaccgctacaggcggggcggccggggcctcaggcaccacagcagtagccgcagccgcagcagctggtccctcagcccgtcccgcagtcgcagcctgactcgcagccgcagccatagccccagccccagccagagccgcagccgcagccgcagccgcagccagagcccctcgccatcacccgcaagagagaagctgaccaggccggccgcgtcccctgctgtgggcgagaagctgaaaaagtgagcggggcgggtctggaggaagagggctgccaatctcgggtggggagggtgaacatcactgttttctttttgaggggaacttagccctaccctgggaggtctggggggtggtgtatggccctggcctgggagggtggatttcagggggacacagccctggcctggggggtctgaggaggacacaccaaatcctggaggatctgcacaattagaaccttgtcctgggtgagggtcagagggggacaggtccctgtcttacaggttctgtggggtctgagagggacatggttgcaccctggggcatctgaggcccatgccttggctacctggtctgagggcagtgctgaggctggggtcagaggtggcagctgccctttccccctcccaaccatgtcctctggccctgcccccacccaggaccgaacctgccgctggtaaagagacaggagctgccaaagtcagtaagaatttggaactcgcccgtctaattcccgtcagcagcagtgcccaagagctgggcccggtgggcctgcaggggggcccgggtgggctgggagatccagccccagggacagggaggggaggggaagggtctgcccctgtgagaaccatgtccctctcccctcctcactgtacactggggctccacctgtcactgaacctctgggagcctcagggctgtccacagcctgcccctcctccccacgtcgttctcccccccccaccccccccccgcacaaagccccaggcttttggctgaggtgggttgtgggagctctgggacacccaccccctctcccgcctcttctcccccctccccagcccaagctgacgcctcaggagaagctgaaactgaggatgcagaaggcgctgaacaggcagtgtatgttctgccctgtccctccagggtttcacagctcttctttcccttggcagtgggagcaaggagactcagcaccactttgggaggcctggcccttccctagagaggccacgcaggcacggaggtgctctggggaggaatgggtttgcatcagctccgctgccgctatgctggggcctctgcagtcaggttgacctgtctgagctcagcttcctcattttagagagtggggctcttagcgggcacggtggctcacacctgtaatcccagcactttgggaggccgaggtgggcggatcacgaggtcaggagatcgagaccattaacacggtgaaaccccgtctctctaaaactacaaaaaattagccaggcatgttggtgggcgcctgtagtcccagctactcaggaggctgaggcaggagatggcgcgaacccggggggcggagcctgcagtgagccaagatcacgccactgcactccagcctgggcgacagagcgagactctgtctcaaaaaaaaaaaaaaagaaaaaagagagtggggctcttaagggaacccctcagccaccctgttctttctctctacagtcaaggcggataagaaggcggcacaagaaaagatgatccagcaggagcatgagcggcaggtgaagtgggaaagggagggctggggtgacgggtgggtgctggcctggccacgtcctcatagccctgtctgctgcaggagcgggaagacgagcttcgagccatggcccgcaagatccgcatgaagtaagaccttgcccctccctgtcccatggccacacctcctggcctgcctggccttcccaccatgggctgctggctcaagccctgcccagctccctgtgggtggatgaaaggcagagatccctgcctggccctcggggctgtgcccagctgcctctcttgctcctctccctgaatttcctcccaccatttcgacctgcctcccgccaccgcgacctcctcccagctcttccagcctccaagtgccagtcacctttgctgtttttttggcctggcaagctgttcctgataccccttccccactcacccaccgccatgggtctttctcctgtcccagcctcagtttgcttatctcctaaatggagatacagtcactgtcccacctcacaggctgttgggaggatttgacaagatcaaggccaggcacggaggaggcacccagtagacgtagccattgggttgccaagcctggccactgtgacggagaccatttcaacactcactgtgtgcaggtgccccagtgcggcaggaaatgatgggactatcctgcctccctctgttccccaggctttcctaggaaggggctgggattccagtcagccccgccagctggggtccctctgaacctggggctccctttccaagcggggattggtggcagtaccggcccccttggtttactgtcttcctcggagtagggtgttggaagcacctgccctccctgagttcagtgtgtccagtgttcccggccagatgctcatgccatgccttcgcagggagcgggaacgccgagagaaggagagagaagagtgggaacgccagtacagccggcagagccgctcaccctccccccgatacagtgagtgtccccaccaggctgcagggctctggggctttaaagaaaagtgtcaagcagggttaccaaaaaaaccatagtacagccgggcgcggtggctcacgcctgtaatcccagcactttgggaggctgaggtgggtggatcaatcacctgaggtcaggagttcgagaccagcctgaccaacatggtgacacacatacgtacacacacacacacacagattgctttagtcacaaggtgattgcagcaattagaagtgctcattccggcatgggctggtgaggggcacagatggcagccactggactctctggaaatgtcccctcatttggagacaacccctgaagttcagttttgaggacctcaccccaggtcaaggaagaggccctggccctggatgtttgctcgctcttcacctgttgttttctttccaggtcgagaatacagctcttctcgaaggtaaggaagcccatgaccctccactttcttggaagtaacacttgtcctttgatgggaggtcctggctgtcattcctccagcctcaccctgtacccacctccagttggaggggctggtctcatcccttggggaacatccttccctccacagacaagtgccccgatcactgaagcatccacggccccaggtgtgttgatgtgtgtatgccccatcctcacggcccctccctttctctttccaggcgctcaaggtcccgatcccgaagcccccattaccgacattaggcagaagagtggggggtggggaggacaagggggtgggtaaggggctcaagctgtgatgctgctggttttatctctagtgaaataaagtcaaaagttatttaattcccgtcacctgtctcagtgtcatctgtgtggttggtgcagggctctcccaccccagggcccatgggccagcagagccagctgggagggcgcttgggtttacaggccagatgccagtgctgcctgtgtgggacatcttgcccccatctgatggctaagtggcaggcccctgttcatcagaacctgccatggctcagtgaggcctgctcaggaggccagggcacagtcccaagggagagggcccagacctgcccgcagatgtggacatagggtgtcggcccagcatgtcccacatgggcccctttgcccagggcctctggcgacaggtccgggcctctccccgccctcgcctcagcccctgccctggcctcgcccgcactaggaactgggagcgcagctttctgtgccagtcctgctgcgccccaggcactgggggctggccgttccctcaccccctcactccaaaccggtctgtccagccgtccaccccacggaggggaagcctcctgccccacctcatgcaccccaagaaagccagagtccagacgggtgtaaataaaagggaaaatttacttggagaaggcgggcaaaaacgaggaggtcaatgggtgttggcagcggtaccagggacagtgaggggggctttcctgggctcaggcctcgccggccgcctcagggtgcttctgccgcaggtgtttgtccagggtggctcgcaggccgaagggcacatggcagtgggggcactcgaagcgggtgctgccaggcgtcatgccgtgcatgcggcggtggcggttgagcttactgctctgggcgcaggcgtagttgcagaactcacaggtgtaggggcgctccccggtgtgtgagcgccggtgcaccgtcaggttgctgctgttggtaaaatgcttcccgcagaactcacagctgcccccgggcccgcggctcttgccccctgacttgggcatctttttgggtgatgccttctggctgtttgcagggtcagttctttgttccgtggtgatggctccccaagtgtctccaccagggccggcttgagccccactgccaggagccccgggttcctggacacctgctgtggcggcggctccagccccctcaccaccgctgcatggaagggtgctggtgggggcagcagcatggacagccggctccggaggggctgcagaggcctgctcctggctggtgtcggccatgagggggctctggggcggcacctgccggtgggtcttcttgtggcggttgagcttgctgctctgggcgcaggcgtagggacactggtcgcaagcatagggccgctcgcctgtgtgtgagcgcatgtgcactttgaggttgctgaaggagctgagggtcttcttgcacacaggacaggtggggctccgccgggtgaggccgctgccacttgcacgggggctcttggcctcagctgctggccccaccactgccgacacggctgcagccacctcggccaggcccaggagcggggcctccggggcctctgattctgtctggtagatggacagtccgtggtcccactgggcgtgacgcagcagcttccaggccactgtgaactgtttgccacagcgcaggcagctcaaggccttcagctcctctcgttctggtaagaaaaagaggcagagtgttagtgcggacagctgccagctggacaccttctgtgggataggcactcctgcaggggcaaaggacttggcagtaacaagacacacacaccctggaaggaccaggaagctgacgctcagaggaggggtggacacgaaaaatctgtggagtgggtgctaagtacctgaaaacatttttttttagacagtctcactgtcgcccaggctggggtgcagtggcacgatctcagctcactgcaacctccacctcctggattcaagctattctcatgcctcagcctctagagtagctgggattacaggcgcccgccaccatgcctggctaattagtagagatgggggtttcaccgtgttggccaggctggtctcgaactcttggcctcaagtgatccacccacctcggcctcccaaagtgctgggattataggcatgagccactgtgctgggccatgtgtttgaaaatcttttaaaaagttatgttaactcagtaagcgcttcctacatgctaggtgctgagccatggctcatagcccggctttccctcaggacaggaaaataagatctccattttccagacaggagaactgaggcacagagaggcatttccccagggttgcacagcttggaaggggtgaagctgggatttcaatccagactactgggggagggggagagggcagaacagaggcttgcttgcttttttttttttgctttaaatttttaatttagtattttttaaagagatggggtcctgctatgttgcccaggctatttttttttttttttgagacggagccttgctctgtcgcccaggctgcagtgcagtggcgcgatctcggctcactgcaagctctgcctccggggttcacgccattctcctgcctcagccaccacgccacagggtttcaccgtgttagccaggatggtcgcgatctcctgacctcatgatctgcccgcctcagcctcccaaagtgctgggattacaggtttgagccaccgcacccggccgcccaggctattctttaacttaatggcctcaagtaatccttccgcctcagcccctcaaagtgctgggattataggcgtgagccaccatacctggctgggagcagaggcttttgaataagatttttggtttaggccgggcacggtggctcacacctgtcatcccagcactttgggaggctgaggcgggttgatctcttgaggtcagggatttgagaccagcctggccaacatgatgaaaccctgtctctagtaaaaataaaaaatagccgggtgtggtggtgcgcgcctgtaatcccggccacttgggaggttaaggcaggagaatcgcttgaacccaggaggcggaggttgcagtgagccgagatcccaccactgcactccagcctgggtgacaaaagcgagactctgtttcaaaaaaaaaaattttttttggtttaataaaaataatttttaaagtaattgagatatctgggcatggtggctcatgcctgtaatcccagcacttcaggaggccaaggcaggtggaccacctgaggtcaggagtttgagacaccagcctggtcaacatggtgaaaccctgtctctaccaaaaatacaaaaattagctggccatggtggtgcacgcctgtagtcccagctacttggagggctgaggcaggagaatcacttgaacctgggaggcggaggttgcagtgagctgagattgcaccacagcactccagcctgggtgacagagtaagactccacctcaaaataatggggtagctacagagaaagcttagcggccacctagtaaagaggtggtagtgacctgggtcccccaccctctgcatggatctcaaattgagcccccaaacctgaatttggatttctatctggaccttcggggtactctcagtggacacttcctaggtgaactagcctttccatttttcaaattctagagtcttggatgggacaacctttgtgatacaaccagtcctgggtcaagagcacaggcctgcattcaaattcagacttctctgctccctaattgtgtgaccttgggcaagacatagtcctctgtgtgcctcagttgctagaattcagggaccctagagatcccctccctttcaagggtggttgtgacctcgcttggggaatggttgagagctttggtccacataagcgctcaaacagcagagcctgtgaaaccaaggtgcccatgattctccaagccctgtagtgttttgttccagcgattccatcacagcccctcgctcgctcctccaggccactctccatgctccagctctaaagctgattcaatcagtcacaagcccctcctctttcccaccaccagaccctccctggcccaaccctaaataattccacttctcaaaagtctcagaagggcaagggccagggggctggaaactaggtttggattaagccctgcagccaacactgaccaaaagctcaccgagggtcaagccccatgtgaaggcttttaattccctcccaagagaaggaacccgggtgtccagcacccgggagctcgctcaaaccaggggattcccagcacgcggggctgggagattccatcaccgagggaagccagaagccccttccttggctctgaacactcagctgtactagcacctcaatcagaattgacagagagagacaggagggggtggcaacctccccattccagctggcctccactccccctccccccggccgctgccctccctagaggtcccctcctactgccaccctggtccagccacctggccagttatttctggccaaggggaaggagaagtgaaaccaggttggggtgtgtgttggggggggcaaaatcccgggctagtcttctggggctggccacaccctgtaggcggccctccttccctgcccagtccccccccgccccccctccaccgccaccactggtccctgccctaggacgggcaggccctggccacgcctaggctgcacccgatggggagcgagaaaggggaagtagtgctcagtgccctgccgtccagcccagcccctttccagcaggaagcccagccctcgaacttgagagggggactgcacccggctttactcacctgagccctggccgcggctggggcctctgaagagctgacagcccagcttcttgtggtccatgaaggcagtgatggcctccaacgggaaggtctgcaggcagcggccgcaggtcaacagatctgggtgtttgtcggtccagggctggcggtctgcagggaggaagcgggtggtgagcgtggggtggggccaggatgggggctgagggtgctgaaggagaggggaaaccgaaggtcagaagggggcctgaggggcaggacggggcgaaggagataaggcagggcgaggggcccatgcccaaagggaagggtcccacccgagggtcaaaggtaagggaggctgggcccagggcccggggtgctcaccgggatagttcggggtcaacggcgtccacagggtccacgggttccgcgggccgagggcgaggagggcggccccggcgggcatggggccaggggagtggtggggttcgccgccgaaccgccccgccgaggacacctccttcggggagaagggccccagccttggggcctgttggggctgcgcgtctggctcgggcttgagttcgatgacgaggtcctgcatttccatctcgtcgtctgggttggcggcgggcgcgggctctactcggcggggcgcgctgccggccttgcggcgggacatgagtcgcgggccgggcgagcgagcgggcgggcaggcaggcaggcgggcgggcggaggacgcacgagcggaggacgcgcggaccgtgcgcgctcaggtgagtgactgcggcgacccgccgcgaactcttacacgtgctggccgggcccgtggctccgcctaccagggcggggctcatgggaggggaccgagccgccctgctggggccctgacggcggcctaactcaatctaggcagtgtcccgtgcgtttggcttagtgaccaaatttaatcacaccgagttcccacaaggcattgaaacagctatccctgatcccgttttagggcgggtgaaactgagacacggcatgcccacacgcacccccaagcgagaaaaatagtcggtcacgtttcttattaggtgcctgatagtaatctgggctatttcattaaatgcattacaataaaaattcattttgcaagcattcactgagtgcctcctgtgcgccaggctctgtttgaagccctgagaatacaggagggaataaacagaagataatctttgtttgcacggagttcagacggtgggggaagacactataaacataattacgtaaaatatagatggcccttcatgatgaccagtgccatggagcaaaagaaagctggaaaggcggagagggttactggggttgagggattcaattttctcccctatgatgggaaagggcatggtggagctgaggctggagggaaggaagcccagccagtgggcctgggcattgaggaattacaaggaaagggagaggcaatacgggttggggattgagttcagtgaaaatatgggggcagatccaagcaatcttttgatcgctttaaggtcttttggttttcctgagaccggagccttaggagggttttgagcagaggaggactgtaatcatacacatcgactctgttcctagaccagaagtcgccattaaaaccaaatagccaagcagctcacctgcctccactccgcctccttgaacttccctcccctaagcagttctgtctgctcactgtttgaagtggcatcgacaccctgccccaccctcaatccctgatgagtattcttttcttcctggcaccgactgcacgacagtatagaacggcttgtggactgtcctctcccccacccaatgcaagccccctgaggtcagggcaagaacctgtcctcccccagctgtcctcagcccagatgctgatttcagatgctgatctcttggagttctgcacattgttattcaggtctgggttccattgtcctcctgagagcagagggccctgaccaacagtatctaaagtagccccaccctgctgaaggccttgcaaattacactccatgacctccatctgtccccagttccctcttggatctcactttctccatctgtcaaaggaggtagggcaggttggaactagagggttatctgaggtggtttcttcttcactgccgcctcctctgatcaccctttttttttttgtaatttttaatttttcaaaaaaaattatttttaaatagagacagggactcgctttgttgccctggttggtctgaaactcttggcttgaagcgctcctcctgcttcagcatcccaaagtgctgagattacaggtgtgagacactgcactcagcctcagaccacccaattttaagttccatggcaacccagccacccactatcccattgcccttattttactctttttttttttttttttttttgagatggagtttcactcttgttgcccaggctggagtgcagtggcacgacctcagctcactgcaacctccgcctcccgggttcaagtgattctcctgcctgagcctccggagtagctgggattacagatgcccggctaatttttctatttttagtagagacagggtttcaccatgttggccaggctggtctcgaactcctgacctcaggtgatccacccgcctcagcctcccaaagtgctggaattacaggcgtgagccaccgtgcccggcctattttattctttatacatcactttgatcaaaccctgaaggatcttgtttacatatttgctcattttaccctattctgtcccttctacccccactagaacgtaggttctaggaggcaggatgggagtctgtcttgttcataaatacaacccctactcgttcatagttaagtcaacaaatatttattgcgcacctactatgtgtctgatgatattctttcaacagatatttgcagagcaccaaattgtgtacctggcactaggccttggtgatctagtggaaagcaaaggcccacaggatccctgcgtaaagaggaccccgcaaggagaaagtgaattctgactgggcctggaatagggaggttcatattccccattcaaggcctcagtttccccctttgtaaaatgggactgcagggagagctggaggacaaaatgaccgcctctgatccagcccagctactttcttagtatgcggcatctgaaaccatgatctccaggtttcctgtagaggagcgggggttcccactggaagcaaggggttaggagtgggtatgtgtagggggatggggatgcaaagaccgagctctgcccttaacccagcagggaggaagtcttcccctctctgaacctcagtttcttcctgcctaaaatgggcatcccagacgcccccaactcgcaggcaggaagatcggtcccaagtgccccgcaaagccgcgggccaggtggcgacccgggctgtgctggcttccaagcctgcgagccagcccgcgaccacgtggggcagtggcggcggcgcgggcggaacccaggctccgcggcttgcggcctgcccgggcctctgcagcgggggcgccggcggaagtggggacaccagtagccgcggacctcggtgagtacaaggtggtggggggtcgccagcaggttccctctccccggccccagctctggacgctcaccccagtgcaacgccctgagtgacggaaagaggtaggaccgcgcctgcagcgccggctggagggacgttctggtccccagacgctcctatcagggactgtttgatcccgatcgccggcagcgggaatgccccacgcgggtggggtgaggagaagggagaaggagaaaaacttcccctccggaaaataataaatggccacgataacagaagcatcggtggcagtcatcccgctttacctggagcggaatcgctcgctcagtctgagcctggaggtgggaagaaggtccagtccgaacgcccagggcggtgtggggagtggacgcctgggggccgggaggacctacttagtataagaaaaggagagcaatgggtggtcagggcggaattgaaaggaaactgaccggccccaggggagaaggggaggggagagattctgtgcttggggttctgaccctctcgggtggccccatttagctaatttgcatcaagattcagcagccgatgatgtctgtatgtgtgtgtgtgtctgtggacacgtcaacaccttggttaattaattaggtctggcggcttctctgttgacaactcagctggttccacaccctggcaattgtgaagagttggccaaatgtttgtccactgagctgatctcctctctggagcaccggggccaccaggagggaggtctgtgaaacccctgcccctgccattgacctaagtgttgggctcttgaatctaacagactagtttttcaagtcgtgggggatgggcttgggcatttttccctgaaaccttcggaaatccttgccttggagactgaaaggataaaggcctctggggccaggtcaccagggacaatggataacgcctgcctctaccctcctgggcacaccctgtgtgatctttcttaaaccagtttcttatcaggtcacaccttggctccacagtctgcctttctacatggggcacgggtgaggaccagagtttgctccctcttcctccaccctccagcttgcaccaaggaaatgatttttttttttttttttttgaaacagagtctcactctgtggcccaggctggggtgcagaggcgtgatctccgctcactgcaacctccgtctccctggttcaagggattctcctgcctcagcctcctgcgtagctgggattacagatgcgtgccaccacatccagctaattttttttgtatttttagtagagatagggtttcaccatgttagccaggctggtcttaaactcctgacatcaggtgatctgcctccctcagtctcccaaagtgctgggattacaggtgtgaaccactgcacccagcccgaggaaagatttgacctgccagcttcactggccactttacaaaaatggggattgcatcaatatgaccaaatctcccttgttttttgtttttttttttttttttcctgatggagaaaacaaggccctatactggccctcccttaatttcattttatccagggatttaacagaattctttggccactctaatcctatctaagtcatttagtaagtactcaccctagagactagggggtttctcttgaaactcaagtgttaatctaggctcaggaaagaccctgggggctggtgaggcctgactaaattggagtgacagtggtcagagaaaataaaaaatgcaagtagggcgtgttggcgtgggcctgtaatcccagcttctcggaaggctgaggtgggaggatatcttgagtccaggagttcaagattagcgtgggcaatacagcgagacctcacctcaaagtaaataaataagtaaatgtgctttttaaaaaattagaaaatgcaaggccgggcacggtggctcatgcctgtaatcccagcactttgggaggctgaagcaggcagatcaggagtttgagaccagcctggccaacgtggccaaaccgcgtctctactaaaaatacaaaattagccatgtgcagtggtgcgcgcctgtagtcctagttacttgggaggctgaggcaggagaattgcttgaacccgggaggcggaggttgcagtgagttgagatcatgccactgtactccagcctgggcgacaagagtgagactccgtcttaaaaaaaaaaaaaaaattagaaaatgcaactatcccttaattccattcacgtggtcttccctgtcaggaaaaaaaaaaaaaaccttggagtctcccttggctgctctttccctcaaattatatatcccttatcctgtccatcaccgagggctcttgacctttctttttttgtttgtttttgttgttttgagatggagtctcactctgtcatccatgctggaatgcaatggcacgatctccgctcacttcaacctccgcttcccgggttcaagcgattcttctgcctcagcctcccgagtagctgggattacaggcacgcaccaccacacccagctaacttttgtatttttagtagagagaggtttcaccatgttgaccaggctggtctcatcctgacctcaggcgatctacccacctcagccttcaaaagtgctgggattacaggcgtgacctactgcgcccagcctcgacctttcaaacatagcctaatctgaccacttctccccattcccattgtccccagcccatactagacgccatcttcttccacctggaccactacagtgacctcctcattgcgttcctagtgtctcccttcaatctcgtttattgtccatgcagcaggcagaggatcctgaggaccttaagccagattctgcccatccttcactcagaactgtccagtggcttcagtctcagagtagagacccaaattgtcatcacagcccacaaggcactctctctgtccctgcccccacctcctccacactggccttgctacgccccaaagccaccctttccatgatctttgcattttgctcttccttctgactggaatctccacatggctccattcctaatttcattcaggtctatgctcaaacgtaatcttatcatagggatctttcctgggctcccttgaaactaccctctatcccccaggctgggtcaggtgtctcctctggactccttcattccagccctactcactttgggtcatcactgcctaaggacaggtctgtgtcccctattggactgtgagcccacaaaggcggaactgggctctcagtcctagacgtgtttccaagaccgcccaatgtgggtcatgcacagagcaggcactcagatgatgtgctaacaatgctagataatgtggatgagtgaatttttttttttttgagacagggtctcatactctgtcacccaggctggagtacagtggcacagttatggctcactgcagcctccacctaccaggctcaagcgatcccctcacctcggtctccttagtagctgggactctagtcgcacactacccatgcccagctaatttttttttttttttgtagagatggggttttgctatattgctcaggctggtcttgaactcctacgctaaagcaattctccagcctcagtctcccaaggtgctgggattatagttgtgagccaccgcacctggctagaaaacttttctttggtgcataaaaatgatataaaattcaaatttcagtgtcccagtaagtaaggttttgttggagaacagccatgttcatttgtttccatattgtctatggctgctgttgtgctactgtggcagagttgagcagtgacagtaaaatacttacagagaaggttcgcagacctctgctacgtattttgccaagaagaaaaataaaataaagttaaaattgaaaatatgttgcccgctgggcgcggtagctcacgcctgtaatcccggcactttgggaagctgaactgggggtgggtcacctgagaccaggagatgtagaccagcctggccaacatggtgaaaccctgtctctactaaaatacaaaaattagccaggcatggtggcgcgcacctgtaatcccagctactcaggaggctgaggcaggagaattgcttgaacccaggaggcagaggttgcaatgagccaagattgcaccactgcactccagcctgggggatagagtgagactccatccccaaaacaattttgccaaggaggattctatttgggccacctatgggcatgtgagatcagtaagatttggcagctaattatgcagagtgggtgatgaggtttagatgcctcccagggagagctctttttcacattttcttttccaattcttcttctttttttttttttttttgtttgagacagggtctcactcttcccaggctggagtgcagtggtgcaatcacatctcactgcagcctcagcctcctccggctcactagatcttcccacctcagcctcctgagtagctgggactacaggagcgcaccctttgcccagctaatttttctatttttctggagacgagattttgctatgttgcccaagctggtctcaaattcctgggctcaagtgatccacctgcctcagcctcccaaagttctggaattacaggtgtgagccacctcgtgcccagctgcttcttgctttctgaaattaaaatttaggccgggcacggtggctcacgcctgtaatactagcactttgggaggccaaggcgggtggatcacctgaggtaaggagttcaagaccagcctggccaacatggggaaaccccgtctctactgaaaataaaaatatcagctgggcgtggtcgcgggcacctgtaatcccagctacttgggaggctgagtgacgagaatcgcttgaacccgggaggcggacgttgtagtgagccaagatcgcgccactgcactcctgcctgggcgacaagagcgagactccatctcacaaaaaaaaaaaaaaaaaaaagaaattaaaatttagtggctgggcatggtggcttagacctgtaatcccagcactttgggaggctgaggcaagaggatcacttgagcccaggttggagaccagcctgggcaatatagtgcgacttcatctctataaaataaaataaaattaattaattaaaaattttatttatttatttatttattttgagacagagtctcgctgtgttgtccaggctggagtgcagtggcatgacctcagctcactgcagcctctggctcacgggttcaagcgattcttatgcctcagcctcctgagtagttgggattacaggtgtgtgccaccatgcctggctaatttttggggcgtttgtttgtttttgagatggagtcccagtctgtcacccagactggagtgcagtggcacaatatctcagctcactgcaacctctgcctcccgggttcaagagagtctcctgcctcagcctcctgagtaggcgggattacaggagcctgccaccatgcccagcccagctaattttatttatttatttattttttgagacagagtttcactcttgttgcctaggctggagcgcaatggcgcagtctcggctcaccacaacctctgcctcctgagttcaagtgattctcctgcttcagccttccaagtagctgggattacaggcatgcaccaccactaattacagaaatgcaccatcaggctaattttgtatttttagtagaggcagggtctctccatgttggtcaggctggtctcgaactcctgacctcaggtgatccgcccacctcggcctctcaaagtgctggaattacaggcgtgagccacagtgcccggccaacacccggctaatttttgtatttcttagtacagacagggtttcaccgtgttgaccaggttggtctcaaactcctgacctcaggtgatccgcctgcctcggcctcccaaagttctgggtttacaggcgggagccactgtgcccagcctatgttcatgtcttctatagccatctttattccttcctccctctttgtgacctgtttgtctgcatcagtgtttcatttggggccatcaggagacgtttggcaattcatggagactttaaaaaaaaactgtattgagatgcaattcacattcaccaattcactgttcaccagtggtgacatttttggctgtcacaacttgaagatgggatgctactggcatctattaataggaggcagaggctaggatgctgctcaaaccctacacctatgcgttggacagcccccacaacatagcagataattatccagccccaaatgtcaatagtgtccagactgagtagccctggttcacatccttggtctatctgcagggtcctgtcttgcaaggggctcacagttcaggtgcagagacaggaagagcctaataagaaaaaggacaagttagtccaggcacagtggctcacgcctgtaatcccaccactttgggaggctgagatgggggggatcacttgcggtcaggagttcgagaccagcctgaccaacatggtgaaaccccgtctctactaaaaatacaaaaagtagctgggcatggtggtgtgtgtctgtagtcgcagcttctcgggagactgaggcacaagaatctcttttttttttttttttttttttgagacggagtctcgctctgtcgcccaggctggagtgcagtggcgtggtctcggctcactgcaagctccgcctcccgggttcacgccattctcctgcctcagcctcccgagtagctgggactacaggcgactgccaccacgcccggctaattttttgtatttttaatagagatggggtttcaccttgttagccaggatggtctcgatctcctgacctcgtgatccgcctgccttggcctcccaaagtgctggtattacaggcgtgagccaccacgcccggccacacaagaatctcttgaacctgggaggcggaggttgcagtgagccgaggtggcaccactgcactccggcctgggtgacagagtgagactctgtctccaaaaaaggaaaaaaaagaaacaggacaatttcaatcacctcccttctgtgcctggccccagggtcttgggtacccaacacttgtcactcagctcagttagtcctcactaggtttagagaggagaggaccaagccacagggagtggtgcagctgctaaaacctaggtcctcctctctcaggtctgcacccacaaggccagcatttccctatacacattcaacatcatagcatagcgcttcatatgtcccagacatgtgccaaacatggtaggttagttaggtaatttagtccccatgcccgccctgtgagttagggctctgttttacagatggggaaacagaggcacagattagtcaagccatttaccccaggtcacacagcaatactaacaataagagcagttcactattatggagaacctagaatgtgccaggccctgtctggcaggagcctgttgaatcctgataacagcataggcagcaattggggctatttttccatacaatggaagagaaaactgtctcttactgatgtcacacagctaaaccggcctgggatctccactcttcattcattttgttttttgtttgtttgtttttttcgagatgagtcttgctctgtcgcccaggctggagtgcagtggcgagatctccgcttactgcaacccctgcctccctggtgcaagcgattctcctgcctcagcctcatgagtagctgggattacaggcacgtgccaccatgcccagctaatttttgtattcttagtagagacggggtttcaccatgttgatcaggctggtcttgaactcttgatctcgtgatccacctgctttggcctcccaaagtgctgggattacaggcgtgagccaccgcgcccagccaatgtttgtttgtttttgagatagagtattgctctgttgcccaggctggagtacagtggcacaatctctgctcactgcaacctctgcctcccaggttcaagtgattctcatgcctcaggctccccaagtagctgggattacaggcacgcaccaccacgtccggctgatttttgtattttagtacagacggggttttactatgttggccaggctgctctcgaactcctgacctctagtgatcctccagcctcagcccctaaagtgctaggattataggcatgcgccgccatgcccagctcattcatgaattctcattggtctctatggcaggcagtttctgggggctggagatccagcagtgggaaaagcaaggtggccaccttgaaactcacggagggaaaggagatacaggcagatacagggaaccgaaagtgcaagagcccaagaagggattgccaggcatcgcgcctgaggatcagcgaggaggcctgtgtggctggggtggggagagcaagcgtggtacaccacgagggtgccggcaggatccagagctaagacagaagccacaagagggctccgagcagaggagggatatgatctgactcaggcattaacagggtgttggggtgcagacggcggggggtgaaggtggaagccagggacccagtgaggagttgactacagtactccaggcaggaagtgtctgtggctgcagcaggatgctggcagtggaggaggtgagaagtgttaggttgtgaataaataaatatgtgtgtgtgtgtatatatagatatataatttttttttttttttttttttgagacagagtcttgctctgtcgcccaggctggagtactgtggcacaatctcggctcactgcaacctctgcttcccaagttcaagtgactctcctgcctcggcctcctgagtagctgggattacaggtgcccgccacgatgcttggctaatttttgtatttttcgtagagacggggtttcaccatgttggccaggctggtctcgaactcctgacctcaagtgatctgcccacctcggcctcccaaagtgctgggattacaggtgtgagccactgctcccagccttatacaatttttttctcagcctttctttgtcttttatgactttaatatttttgaagagcccaggttagttgtgctgtttttgtttttgttttttctaagacaaagtctcactcttgcccaggcgtggagtgcagtggcgcgatcatagctcactgcagcttcaaccttccagggctccagtgattctcttacctcagtcttctgagtagctgggacttccacgagtacattgtcaagcctggctaatgttttttatttttagtagagacgaggtcttaccatgttgcccaggctgctcttgaactcctgaacgcaagcaatcctctcaccttggcctcctgaggtgctgggattataggcatgagccaccatgcctatccctgttgtccttgtttggcccagaggctggaagatcacttgaggccagaagttcaagaccagcctcggcaacatagtgagaccctgtctctttaaaatttaaaaaaaaaagaaaaggaatagcacagaagtggtgccctgccttcttagtgtcccattcctggagatgttggctttgatcactaagttaagggggtgcataccaggttcctccagtataaatttgtgtttgccctttacagtgaatgaatatcttataagtctgttaagactatgtagataccttatacttcatcaaactcccatccatgcttttttttttttttcttttttttgacacagagtctcactctgtcgcccaggctagagtgctgtggtgcgatctctgctcactgcagcctccgccttttgggttcaaatgattctcctgccttaacctcccgagtagctgggactacaggcgcatgacaccacacccggctaatttttgtatttttggtagaggcggggtttcgccatgttgaccaggctggtctcgaattcctgacctcaagtgattcgcccaccttggcctcccaaagtgttgggattacaggtgtgagccaccgcacccggccctatccacacatttttgcatctattccttttatatttatttacttgccagtctacagtaaggattatattttccttctcttccttatttattcatttatttattattggtatggattctggatttctgttttatccagtgggttataatctgtaactatcattattgtattgttcaaataattccagatttggccactgggagccctttcaagctagctcatgtgtgagtgggaatctatctagaagatagaatttcctgatggattgggtgggttgtgtgtgagagaaagctggggtttattcttttttttagagacagtgtctcactctgtcacccaagctggagtgcagttgcacaattacagctcactgcagcctccatctcctgggctcaactaatccttctccctcagcctcctgagtagcccagctaatgtaaaatatatatatatatttttagaaatggggtctcgctatattgcccaggctggtctcaaactcccagcttcaaagtgatcctcctgccttggcctcccaaagggctgggattacaggcatgagccaccatgcctggccaggttcatcttttggcaaatatttattgcctataagttgagataaaaacattataaaagcagacaaaggtccttgccttcacggggctcatgtttttgtgcatgtgacacttttgtttctgatccaagccattgggggacgatggcacagattttaggagggtggatcagtctggggcaggtgcagtggagctgcctggtagaccagcctctgcttccactcctccctcctccattagccccatgcttaccatgtaatgacttcctgctctttttcttcactcaacagccaagacaatgcaaactccagtgaacattcccgtgcctgtgctccggctgccccggggccctgatggcttcagccgtggctttgcccctgatggacgcagagcccccttgaggccagaggttcctgaaatccaggagtgtcccatagctcaagaatccctggaatcccaggagcagcgggcacgagccgcccttcgggagcgttacctccgcagcctgctggccatggtgggtcatcaggtgagcttcacgttgcacgagggtgtgcgtgtggccgcccactttggagccaccgacctggatgtggccaacttctacgtgtcacagctgcagactcccataggtgtgcaagcagaggcgctgctccgatgtagtgacattatttcatataccttcaagccataaagatattgtgttcacttttctgcttgaggctaaggcactgtatcccaggcctcccaatgttcccgagccaggaactctgggccccatggagttatgagctcccttggaattttgagccaagctttaagcaagtctggactcctgagacctcctgggtctagtcagtaaaattctgcaactctaggaattctaagatcccattggaaggaatgctctacctcacagaactctgaaccctacagaaatatgggcctgctgccatttcctgaagaccggggcatcggggtggggtgataaaggatacaacctgcacagggggaagttattaaagaggctgcaaagtccagccaccctgaagatactccccagtgctcccctcctgctaaagaaccagttaccccaggaaaattcgactcctgtttttctttaattaactataccgacggggatggagtcatctttaggggctggtagggtggttatccaagggctgaatccagtggagctgggccaagtacgacaggagtccagataaaggtgtaggggctgcacggccgcaagtctcctggaaaggctggagtgaccggcatgccgggattgggagattaggatttgatttcattttggggcgggcggtggctcgtgctgggtcacgtggtcgtgcccaagcgctcctcctgttgccccacctgtggttgctgtggactgcacacgacagcagattcgctgtcccctcgttggaggcgaatggtcggaccccgagtggcggcgcccctgataaaaggccgaggattcgcgatcagggtgcaacttcactccctcctcttttctctccagccttgcagcgtggccgttcacatcacgcgcttcactaagcctcctatcactagtaacctttcagcgcattgtttaaaaagaaagcagtttctgtccctttctgtagttcctttaagttcaggatgtaagcgaagccttccattaagtaaaggtgagtgtcgtttcgtctcagtcgcgaaagtgcggcggccgatgatgaaccgcgccaggagcagcctcagcggccatcagtccattcgcagcgccggctccgccgaggcccggacttagctctcgagttgccttggcgacgacgcagctcgctccgccccagttcccttttatggtttcagccccgcctcctctagttagccgggtgcgcttcggcaagcgtggcgaaagtgcggcggcgaatgtcaagcgttgggtctgagcctaggggtgtggcttgagctcacgctggttctttcttgcctcggtgatccaccagccttgtcacccaggatttaggttggcagattcgtctctcgcctttggaatttctaccttctcctaggttttgttttttaaaatcaggcctatgataccgctcatgggctcatatttattttagcattgtaatttaagttgtattttatgcaactctaccccgatacagagagctgttgatgtaactgcagcgagcaaatggaggactagagactagcgaaggggccgagacttcgtctccagagtatccctgtcagcatccatcaactgcactcatatattgaatgcagctcctatccgcctttcttttcgacttcttcatgccgttaccactcttcatcagttagtctagcctcaatgttttcatttatttcctttgttttttttgggggggggggaacggagtcttgctctgtcgcccaggctggagtgcagtggcacgatctcggctcactaaaagctccgcctcccgggttcacaccattctcgtgcctcaggctcccgagtagctgggactacaggcgcccgccaccacgcccggctaattttttgtatttttagtagagacggggtttcaccgtgttagccaggatggtctcgatctcctaacctcgtgatccgcccgtgtcggccttccaaagtgctgggattacaggcgtgagccaccgcgcccggcccatttctttcctttcgttgagacagggtctggctctgtctaccaggtcggagtgcaggggcgcgatcatagctcagtgcagcctcaacctaccgggctcaagcgatcttcccacctcccaagtagctggaactacaggctcctgtaaccagaccctgctaatttttaaattttttgtaaagacggggccttgctatgttgcccaggctggtctcgaactcctggactcaagcgatcttcccgcctcagccttccaaagtgctgggattataggcgtgtgccgccgcgccccgccaggtgttttcagttctatgcactccattccctgggctcttgacgaatgtgcgggagctgaatattcgttatttggactccggcaggaaggcgtgggctcagcttcgcgcttgcgcgctgctcttggagacggcgtctacttcgccccgcccctcatagtctgcagttccggctctgcagattcgctgctcacgtttcttttttccgtggcccttcctgccctttgtttctctcttcatgtcacccgcgggacaactctacgtgcaagtcgctgaaatcgattttctgcttcttatagtaagcggcgggctcgccagcctcgagcgaaagtgtgactgcgaacgggcaggcgcgcgcggggctcggcggaggcgcgcttgggctcccggcggcgacgactacgaccactaggagagcggacggaggcggcgcctgaagcggcggcggagcccatgccccgggacggcgggcggacccggagagacaaatccggggcccggggcatgtccccggggcccccgtgaggaggcggcggcggctatggagatcgcgccgcaggaggcgccgcccgtgccgggcgcggacggcgacattgaagaggccccagctgaggccgggtctcccagccccgcgtcgccccccgccgatgggcgcctcaaggctgcagccaagcgcgtcacattcccgtccgacgaggatatcgtgtctggagcagtggagcccaaagacccctggagacatggtagctaccgcgggtgaagcgggggcgggctcgagagggacccgggagtcgggagggatcggtgcagggcccggctcgaggtggcgttcaatagattgcacctaatggtgaataaggggacagtcgtcagtttagaaccgtagtctgttagaaagggggtggctatggagttgggaaggtgaaaagtatctggtttctgccgcaccccacccacccgagacaaagatggtgatcgttttagggtttaaaacgatgagcaattaaagaaagtttggtgttttgtcagatgtagagtgtggcagcctttgcgttcgtagttccaccagagaaggagagaaggagcagttgagaggaggagcgggtcaacactgggcctgaaagggcagttgaaagagtttgatgggtctatgggggtaaaaagaggttaagttgctggtctgcaagccttggggcaaggagtggtcgtgttggccactttcttggctggaaagagggagactataaacttggactgtggctatagaggacttggtaaaaaggagtcaagataaggtcccagaagaggagcagaggtggtggtcaatttgtggttgggtgagggagaaagaggcagtgtggtttttatgttttcttttttattgagacaaggtctcactacattgcccaggctggtctcggacttctgggttcaagctgtcctccctccttggcctcccagagtgttgggattacaggtgtgagccaccgccgcctgctgcaatgtggtattaagaagaaaagccaacgcctaccgccgcctcctcctccaaaaaaaagagaagcagaaggaaggctgtcagtcattcaggagcagaggatgtttgggacatggctacggaagggtcctcttgttccttcctgagaaagaattgggggatggccgggtgcattggctcaggcgtgtaatcccagcactttgggaggccaaggtgggtggatcacctgaggtcaggagtttaaaaccagcctggccaacatggggaaaccccgtctctactaaaaatacagaaattggccgggcatagtggtgcacacctgtaatcccatctactcaagaggctgaggcagggagaatcgtttgaacccgggaggtggaggttgcagtgagctaagatcacgacattgtactccagcctgggtgacaagagcaaaactccggctcaaagaaaaaaaaaaaaagaattgggggatgttatcaagtcagaaattggagttgctggccagtagcaggtgagagagatgaaaaagttggctacttgaagtgttgggagagagggccagcgcactggagagggtcaggtcagtgttggagctgaaaggagtgtgttggagccatagggctgggaaagtggaaagtcgcttgggacatgcagggcagtgttgagtccattttgtgctggagaagtctgtcagttctcctggggtggagcccatgaagtgagggatcagactggctgtggtggccgtggttctgtagaagctgatctgccggccctgggcaaggggagaaactattgccagtctgtggacaatggaggaattggtggctttgatgtgagggtgggaaacatggtaactggaaactgaacacacagggagtccatcatgaatgacagtttggctacttattataattttttagacggagtctccctctgtcgcccaggccaattctcctgcctcagcctcctcagtatctgggattacaggcacctgtcatcacacctggctaaaaatgtttgtatttttagtagagttgggggtttcaccatgttggccaggctggtctcgaactcccgacctcaggtgatctgcccacttaagccttccaaagtgctgggattaccggcatgagccaccgtgcccggctggctagttattcttaaagaggcagtggttaaattaagacttttgggccggacgccatggttcatgcctgcaaccccagcactttgtcaggccaaggtgggcagatcacctgagcccaggagttcaagaccagcttgggcaacaaggtgaaaccgcgtctctgcaaaatatacgaaaattagccaggtgtggtggtgcacgcctgtagtcccagcaactcaggaggctgaagtgggaggatcatttgagcccaggaggtcgatagtgcagtgaactgtgattgcgccactgaactccagcttgggtgacagagacccggtcttaaaaaaaaaaaaaaaaaaaagagttttggcactaggagccagccaagtccttgggctctaggccccagggataggtggttagtttgggacccgggcacagtcagaatgccccctggctattgcgtgatatccagtccagagcaggaaggggaaagacctggagaggcagagcagggtgtttcaagagcagaggctccaggtcagatcctttgagacctcgggctggttacctaactcctgagcctcagtcttcccatctgtgaagtaggtggcaatactcttgccacggaatttaggagaggactggatgaagtcacatatggaaaggaattggccagggtgagtgttctcgatggcagtcattgttattaagacagtgttggtcatcttgggctggtgtggaggagttcatgcatggggtggggcctggatgtggctgcttcagaggcttccaggagaggggagagatggcagtcaatgcgtgggcctggagtgaggtgcgagggggaagatggtcagtttgtgggctgaagggtcaggggtgagggcagcaagagagtctggcacagattgggctttggggggtaaagtttctggtctgcagattcccagaacaggtttggctttcattcagtaagccacttttcctctccaagcctctgtttctttctctgcaaatggaggtgctaatttttaccatggggtagttgtgaagatgaagtaagatagtcctcataaatttctgccacataaatagcagctgtcatccaggcagatttgttttttgtttgtttgtttgttttcacgtgcagtcttgaagaggcagtgaaagaactggagaggcagaaggctatctgtcaagaaaagaggggcagttggagcctggctgggaggagtttagaggaggggtgccggttggtctgtcctgggtaaggggtagagtgggtaacactctccaggctgggggagtctctcattccagcggttgagagaggggcagtaaggtctggttgggactcacactctcgaggagtccgtgcgtctgagctgcagaggtgatgacatggactggactggaagaattggtccatcctgtttgggaagagggcttgaggagttggcttggcagtgaggagttggatgatcttgggcctgggcaggggaggggtcattggtgaagttggtgagtttggacaaagggatttgcaggacagaaaacccaagggcctgggaacagcaaggagcaggggttaggctccatgctggggaggacgatggagtggttcactggccatggggctgtgggaggtggagggttcgccagggtgaagaggaatcgtggtacagaaagtgggtctaaggggaggcccaagtgagaggcccagagggtctggggctggaggactgcagggaggggttgcttggtcttggaacagaggtaggagatttgttggcatcaatctcataagctgtggggagggacagggggtgtcatttgagctgtggatctagtggaagggtggcgtgaccccaaggccaaggggtaacagaagagctgacaggtctgaaggggggagactcagttatccggaagctgttgtgccgtgctagagatggagcgctgcctaggccaggggatggaggagcgcccctgggtgaggaggaagcagcactgggggcaccccagtgcaggggtctccttcagcagagcctcacccctggggctacagtggtggcccagctgggtgggagctgtggggggtgtctacctgagggtgagcgctccctcaggccctgcaggggcccagggtttggggattcctggagatgaggtgatctggaggagggggattgtgagggagggtctcgagcctgcccaggcttatccggattcccatctcccacagtggggttccgcctgctggggctgctgtttcctcattacgtgaatggccatctgatgttcttctgttgtgtgcttgttttcttggtggtggtctctctcccgcgctggaatgggagagcagaggccgaagtccatcctcttctccgctttcctcaaggacactcagttgttgaatgagcgcctgtgggcccgtgaggcctggtggtgtctgagagccacctagcagagtgacatgtagctgaatgtcaggggcctgagcagcctggcgtggggatgccagtggggcagcagtgtgctctgtggcctctggcaagcatgggttcttgcagagcattgtgtttcctcacctgtgaaacagggccagtgatccctgccctgcagaccaccaggatgtcagaggatagggtgaacctgctgggggcaggtctcctcagcaagccacagccaggtgtgtgtagatgggcagggaagctcggggaggaggcaggctgggaatcgtgagtgaaagaggccgcttcagcactgccaggctgggcacgtgggtgcccgtggggagcgagctagccggctgcactgcaccccatcatgttgtggcagacccttcagctcttctgaaggccaaggccagacttacacaaggaacccatcaggccaaactgcaggaatgacctgaggctcggctggtctcctcagtcccagctgaactctgtggggttggaaagataggcatgtgagagggacttgtgatgagagcacatgacaccagccacagtccgggagactcatctcccctcctccagtcctgccggtgactcactccctgctccctgaccatcagtcctccagtgtgtgtgcgttgggggtttgcccactaggaagctacttgcatgaagtcaaggtgtctgcagggcagggtgagggggcccaagcatgctaccatctctggccacctgagctttggaaggcagcgggaggggtgggggcagggtgttcttaaatgcggatcttagggcatggaaatgccatactgttggctattgaaacccgtgctgcagattcagtcctaaaagcaggctggacaggtagacatgcatctgtcagtggtggaaagaggccccaggttagagaatcggcttgcttcagcattcgtggtggagctgctggggagtagggaacagggtcgaggcgggtgctttgatgcatctgctcagatttccgtctgggcccagctccacctcctgctgctggagttggcaagtagaccctgccactgagcagccacgtgactttggcgattgttctctctgcctcgatttttctgtgtctaaaatgcagcagtatgtcctcatagggtgattgggaggattaagtgagataacacagtgcctgatccatagtaaatgcccagcaaatgcctcccttgttattcctgtcatcaccactcctctgcccccacctatagccctaacattttgtttctgtttcctgcccgtgttgtgtatttgtactcctctttcccctatagtgtcccacgtcagcgtccctgctttccctcagaggcccactcctccaggctgggtgccccagcagtccctgacctccaggcctgactctgtctctgccaagctgtgtgaccgtggacaatttgtccaatctctctgagctaaaactaaatcagcctgtctcagcccactagtagaagaggcagcaggggtaccaagattccacactggccatgttagttccagcttctgcctactctggctgatgactttggacaagttgcagctcctccctgagcctgagtctcctctggagcgggggctccaccaccccagccccctgccctgttggagcatgatcaggttagtggtggtattgtgctggtgcctgtcctctgccctcccaggccctttgcacactgtgactcgccgctctccgtgcctgtacatgcagttgggccgcctgattctttgtgcctgtgattatctgtgctcgcatctatttcccccttcaagggcaaagactgtgtatgagtcacctctgtgaccctagtctagcacacaggagggctcgggcacgggacacatgtccgaaggactggggtgttttcctgggatcaaacaccccatggtgggatttacaggaaactttttttgtggtagttaatccagttggtgccaggacgaggactctttctcagggacctacagacaggctttagcacccattctgactcccggaagagcacgcgaagctggcccccagctggcactcggtaaccagccttcagtgcgtcagcgggagtgcgtgtgcacttgtttctgggagcgagtactggggctctgcgaaccttcacaggcatccgactccaagaggattaagaaccgtggggccaaatgccctgtgttggacggactgcagctggagcagtcactgagcacggaggccagaaacctgtttttacaaaagctccccaggtggttctgacaacctcgcttggctgtctgtgtgctttgctccgccatccatcactcagtcccaagcctgccttcagacctcagttcaggggtggctggcattgacctcaaagccttttttggagcaaattaacaggtgagcattgaaatactgcagaaattcaagctgagccggccacctgctgcagtagggcatgggggcaggtgggttaaattcttgccttctggctgaccttagtcatcaccagtcattgccttccatgtgcctgtaccaggcactggtctcagtgccttttgtgtattatcgcatttagatatcacagccaccccaggaggtaggtgccgtttgccccaatttgtagatgaggaaatggagcccatagaggtaaagtaattttcctgaggtcacacagtgggtaagtggtggagctgggattcaaatccaggcagccagcctggcgccgaagcctgcgcagtaataacccctgtgcggcggctgagtgcttggacgcattcggtgcaacgtgccatacggtctcttcatctataacccagaatcgtttataaaatagaggcaacagtgctggctttgcggtgttgtggcagggaggagaaacagaaacaggtggggtaagggcccagccttggtgggcacgcaggagggggtcactgtggttcgtggacagcttgagtccctggagatttgtgctgctcctctgtcctcagcattgcctgctgttctgacccttggcctctgggacgtgttcttcctgtgctactcagtgtctggtatgtgataggcgctcaatatattcttgctgcgtgagtgacttggtgaccccgtaaccagtcatgcattcagcatggtgtggccgtgccacgtgttacgagtcagggcagaagacaggcccagtccatgcttctgtgggggtcacagtcaagtgagggagacacacagtaaagaattctcagcaaaccaggcttctgaggactcagattagggagggtccacagggtgtgcaggagggcagggcagaggcagcttcctagaaaggacgtcaccaaggaaatccagcagtaagccaggtgaggagcagtgggaggagtgcaccaggggtggaaggcagagagaaccagcctggtatgtctgaagaacagaaaaaagccagacttagttgaggtagaggcaggctggtcagaggtgaggctggaggaggcaggagagactgctgtgtggggccttatgggctgtgctagcagggagccccagagggcttaagaaggggcctgggctgggcatggggggctcacgcctgtcatcccagcacttcaggagctccaggcgggaagatcacttaagcccaggagtttaagaccagccttggcaacatgacgagaccttgtctctacaaaaaatacaaaaatcagccgggcatggtggcatgtgcctatagtcccagctactcaggaggctgaggtggaaggatcacttgagtccaggaggtcgaggctttagtgagctgtgatcacaccactgccctccagcctatgtgacagagtgagaccctgtctcaaaagaaaaaggaggggcatggtgggtgtttttaacagaatcctgtgtggaggtgacatgaatagggtgagactgagacagggaggccagggaggggccgtgagccaggagcccggaggctgtaggcttggcgtagcctcatattggctgatagctgacacttgacttcattgacttcttcatcagattcctctgagtcctcccctccaccagcaggtttgccgatgccactgtttcccatagcacctctgaggtgactgttattccccttcccttctctccttggatctgagtcccttccctcgtgctcccccagccagcgtgtccttggcctgcttgggacatcctgcccctgcatgggctgtgggaggcgtgtgggctgtgaagtccggtgacctctccagtgacttcacctccacagtcccttcaggtctcacagtacccagatccagaaaactctacagaccatcccaaacccctctggtggcttagcgcaatatcggtgtctgatcagtcttataaaatccagaaaattctgattctaaaacacgtctggcccaagggttccaggaggagactctggagcccgcagcgggcctcgttccatgtttgtgaaatggcagtaacctgagaggcagcacgggagccccctgggtgccagtcccagctctgcccttgggcaaatcacccagcttctttgcctcagtgtccccatttgtatggggattgaggattaaattagcctctacttggaaagcagctggaacagtagctggctgttgcaggcgctcatgaggacatgggaaagttgagtgaggtggtcactgccttgaacttgactggttcctgcctcccccggctgtaagggttaggcaggtggggctagatgaccagcgggtaggatcatctgcctgagtgtgatttcggctcctccacacttgggctgtgtggccttgggcaagtcccttgacctccctggaccactttccccatttgtgaagccattttgccagatgaggactctctcaaagtttttagactctctgggaagaccagagagccaggcctggggcccacgccagcaggagcacaccctgcatcaagtgtggagctgatgccgctcctgttacatagccgccacagcacctccagggctgagcccacgtcaggctcctgggctggagccacacaggaggctggggtctgctgtttcagctaagaggaggtgggagatgtggaggggcttccctaattgcaagaaggtggttcagaggctgggtgccaaaaggaattcgagagatccgtcatgcttggctatgtttcgtacattaagtaggaaggtccatgaaggcaggacccatctttgtcttggctcacctgtgtccccagcaccctccatggtgcctggccctccgcagggtctcacactggatgaattggtggtggatggaggtacacagtaggcactcagaagttgttctcaccccttcccttcctctaggcagctggtactgagcggttgcctcaaggtgggggtggaggtttggaagtgtctgctgacatccgcacagctcatgtgacttgcccagcgcccatctcacttcgcagcggaagcctgggtcgggagccctgcagtcggatgctcccctcagggctggttgggttccagctgggaatgtgttccctggttaggtgggcgggctcctctagcaagctggcgcttgggacccgccggggtcggactcgtgtgccaccttcacacccacccctccctctctccacggtctccgaggctctcaccagctgctgtcagcgatgtagtggagaactgctcgcgtcctgtgcagtcttcccttttgcaaagcaaagcactgtcacagctgaactcgcttggttccccaggacaacagggagggagggtgggagagtggggctgccaaaaggtgaaagcgagccgcagggaagtgactctctgcaggggtcatgcctcctggtggtggtgatggaggtgatggtactcaaagctcccatttatggagcgcttaacagggctaagctctttacatgcatcgttaatcttggaggaggaaacaggctcacagaggtgccaaggccacacaggtagtagaggaggagctgagttatagcccggcagcttgaatggttctgatcctctgtcctgtttcagaaagcccccagggctccactgtaactacaggacaaagtccacacccgtgggcctggtgtgggaggcctttcccacagaacgcccagcctcctagacacaggcgcctctgcctagcacgcccctcgctagtcccctgcccttcctgaccaattcccgttacccctcccacgcctagacgcaggcgcctttgcccagcacacccctcgatagtcccctgcccttcctgaccaactccccctcccgtgctgccttctgggcaaggccttctctaatccccggacaaagctctgctccgctcgtctgggttcccatggcgcctcctcgctctgttgttatttgttcgggcccatctcccctccctggaccagtgctgcagagggctgcatcctgtccatctggctcctgggaggggtggaaccactgaacgcctccaggaaccttaaggactccgggcaaagtggggttgcttatgagcacccaggccgggtgccgcaaagcctttgtaacccaggcactggggctcaggacagtcagggagcatggggtgtggggaaggaagatttcgttcactgagtccttttttcctgcattcattccttcattccttgccaaccagcgcctgttttgcctccactttgctgtccctgccatgccaggtggaggggcctcccaatggctctcctgctccctctccaacccgctccccacctagcagccacagcattcttgaaaaagcagactttgctattcctgtttcacatcacacttgtgacctccctgctgcctttccctctgatctagtgtccctgcaacaggttaggaagcccaggtataacctggctcttgccaccatcgccggccacgaccgagatcaccttgccatgctcttgctgggttcaagccatcgtggcttcctttcagtcctagaacacgcaggcagctccccacatcctgtcctggaagaccggccccacctacgcacacaggtggctctcactaatctttcaggtgccagcaaacccttccttcctggccctcctaatgggctccccgtcaggtggccagcgatctgcttatctgcgggcctgctgatactcttgccctggactggaagcatcactaggcagtggtgggttgggtttggtgccactgtattccccagtgccccagaccacgtggcactgggcctggctctgggcaggagcgcaatatggcaggtggagaaggaagtggcatgcaatgctgggtcttagtccttgccatgagcagctcagacagtccctaccctagcatagtccctggtccagaaaaggaagtgggcagagaggaggaggagctttagggaggggagtacaaagcctgcctctggtatccccccgccagcctggtgagaatggcagcgcaggactggcaaacaggcccgtctttgctgttgacttgctgggggtcataggccaggatgcttgccctctctgtggggcaggatggtgcccggggtcctttcccactgcgcgtcagtgtttcccatctctccatgtaggacaccgcaccatttagggagtgattggatcccaggacctcctccctgtcacggggtggcaggcaaggttctgataattgatctgccgtgtacctttgtggcaggtgacctaattccccattccctgtgacccatgtgtcacaggtgtcaggggcgaccggccacccagccaagcttccatgactccgttctcactctgtgttctgtaatccccttctgtcacgggcttgggatccttgattcccggcccggttctgcctactatgatcacaatgaacagtcagtgttccgtttccctggagggctgccttccttgctgtgcctggacctgtgttccctgctggacaagtcccagggggtcaggcccggggctttctcggtccctgctgtgtctcctgcacagctccaggcacagagcaggtgttcagtaaatgttgttccattaaaatggagttggggctgttgctggcagagcccagggacagcgccctcatggagcctggcttagagtgcccaagtctgacagtggcctgatcctgtctggtcctggggtggagcagacaccaacaggcggggccatctgactgaatgtcctcccaccagctgttaggtccaggtgtttgtgcttactgccttccagtgcagtcaaaagaatccagggctggcaccagccccttcctcatctcaggggtagaggggtaaccagagaggggcggcacttacccaaggatgccctggcacttgggtccaggctcctgctgctctcctcggccacccctccagctgttttgtttttgtttttgttttttttttgagatggagtttcgctcttgttgcccaggctggagtacagtggcaggatcttggcttactgaaacctttgcctcccaagtttaagcgattctcctgcctcagcctcccaagtagctgggattataggcatgcgccaccatgcccagctaatttttttgtatttttagtagagacagggtttcaccatgttggctgggctgatctcgaactcctgacctcaaatgatccacccgcctcggcctcccaaagctctgggattacaggcgtgagccgccgcgcctggcctgtttgttttgagatgaggtcttcctctgtcgcccaggctggagtgcagtagtgcaatcctagctcactgcagcctccacctcccaggctcaagtgatcctcttgcctcagcctccagattagctagaaccacaggcacaagccaccatgcctggctgattttcttatttttaattgttttgtagagatggatttgcaccgggttgctcaggcttcgttgtgcttttgatttgcatttccttatggctaatgatgttgagcatctttttttttttttttttttttttttttgagatggagtctcgctctgtcacccaggctggagtgcagtggcgtgatctcggctcactgcacgctccgcctcccaggttcacgccattctcctgcctcagcctcccaagttgctgagactacaggcgcccgccaccatgcccggctaattttttgtgtttttagtagagacgggatttcaccatgttagccaggatggtctcaatctcctgaactcgtgatccgcccaccttggcctcccaaagtgctgggattagaggcatgagccaccgtgcccagctgatgttgagcatctttttatgtgcttgctgaacacttgtgtatcttctttggagaaatgtctttttagttcttttgcccatttttaaattgagccagccgggcacagtgattcatgcctataatcccagcactttgggaggccgaagagttcgcgaccagcctgggcaacatagcaagacccagtctctattaaaaaaaaggggagccaggcgcagtggctcacaattgtaatcccagcactttgggaagccaaggtgggcagatcatttgagcccaggagttcgagaccagcctggacgacatggtgagaccccatctctataaaaaaatgtaaaaaattaaccaagcctggtggctcatgcctgtagtcccagctacctgggaggctaatgtgggaggattgcttgagcccaggaggtcgaggctgcaatgagctgtggtcttgccattggactccagcctaggtgagactctgtctcaaaaataaataaaaaataagtaaatgaattgtttgtcccttcattattgagttgtgagagttctatatacgtgtatcccggatgcaggacttctcagctgagcgatttgcaccacctgggatgttttcagcgtgtaatgccagtgcatttccttcccgtctcttctctctggctagattcacagccaccgctagataaaaataaagctgtgaggatactgtagatacagttgaatatcctgcttctgcacttcatttttccgtttttttagaaagcatgatttaaagtacatcactgggctgttgtaattcattctagccatttccgcattgctgagcgtttaggtcctttccagttttcagttgcatagataatgcagtgatgttcgtccttgtccataaatcttcatgctcatcacacgggtagccttcttagaaaaaattcttagaaggtgattttaccaggtcaaagggaaggaacattggaagtctcagatactggctgtgcccacattggacagtgagtgttgagggctagggttctgtcgtcatagtcaccactgtagctttagatttttttctgagagagggtctctctctttttttctgcttttgaggtttaaaccatggccagagacagggtctcgatctgtccctcaagctggagtgcagtggcgtgatcttggctgactgcaaactccacctcctaggctcaagccattctcctgccttagcctcccgagtagctgggattataggcgcgcaccaccacgcccggctaattttcgtatttttagtagagacggggtttcactgttggccaggctggtctcaaactcctgatctcaggtgatctgcctgcctcagcatcccaaagtgctggaattgcaggcgtgagtcactgcacctgaccagattttttttttaatgattgaatgaatagtatttgcatgtgggtgccttgatgttaagatggtgtcttgttttagcgagcgttcttttgactactagttaacttcggttttgtttgtttgttttgtatttttgtgggtttttttttttttttaatggagtttcactcttgttgcccaggctggagtgcaatggcgcgatctcaggtcatcacaacttccgcctcccaggttcaagcgattctcctgccacagcctcccgagtagctgggattacaggcatgcaccaccacacccggctaattttgtatgttttgtagagacaggatttctccatgttggtcaggctggtctgtaactcccgacctcaggtgatccacgcgccttggcctcccaaagtctgggatgacaggcgtgaactaccgtgcctggtcttttttgttttttgtagagatgaggtctcgctatgttgcccaggatggtctcgaactcctggcctcaagtgatcctcctgtcttggcctcccaaagtgctgggattacaggcatgagccactgcgcccgacctaacctgtttattgttaacatgttacatggttctgggaattggttcttcatgccctttgcctatttttattttgggacctttataaggactcctctattgaagatagatgtaattttattgtgcagatatatttgtcctcatttatcatttgccttgcaggaaaggtgggggacaggggtgcaggacactaaagagaagcactttctcctctgctatttcaccgagtcatcatagcaaagccccatctcagtgtgaacagcttgggatggagaaacacagggctggggccctcagagagggcagaggaggcagtggcagcccaggccttggaggccctgcagtgtaggagagagggtgctttagtggaggcccggcctgggaaaagggttagcaggttacagagggtccactgtaaccacaactccagccccatttgctgagcaccaggctgagtgactcggtgaacctgctggtgccccacatttttgcagataagaaactgctacttggggtcattggtcacttgctgaagatggcagaagccagggcagccctgcctgggtccctggacacatccagcccaccacagctatggaggctcagcaagtcccaggagcctcaagtttcagcaggagcctggactccctcgtctcccacagccatggccaccacgtcatcagcaccctctgtatgagggtcctgtatgtcatgtgctgtttccttccagtagcttcctgactcttcaggaatactgttctttgccctgaggatctgtcgcccacctgcatctgcagcctcagctctgctccccctctgccctgttggagggtcctcagaaccgactcttccctctgtctggaaggatggcctggacttttgtgtggctcctgttggcttatggcctcctgtccccatccagtgtaagcttcttgagatgggatgtctggcttttttgttcaccagtgtagcctggcacctagaatagtgcctggcatagaatagacaacaataaatatttgrrgtgawyyrmwsaattccctttttctttttgtttttwyttgttgagacagagtcttgctctgtctcccaggttgcagtgctgtggcagtggycatggctcactgcagtctagatctcctgggcccaggtgatcctcccgcctcagccttctgagtagctgggaccacaggcacgtaccactacacctggctaatttttggattttttgtagagacggggtttccctgtgttgytccaggctagtcttaaattcctgggctcaagtgatcctcctgccttggcctccgagagtgctgggattacagccatgagccattgcacctggccacatttcttacttttactcatcttttaggtctcagtcgaaatgttcttttctcttatgggtcttttctaactattcctccaaatctgaatttgtatcccctgtgttttcccctataatatgcattttcttcttataactggtaaatttttgggtgatttgtttgccttcctcccagtccttgagggcagggaccagccctgttttgttcacggctgtctgcctagcccaggttgttgcataaagaatgaatgaatgaaaatatgttcattagttcccaaacagacctctgarggttggtggcattaccctcttgttatgaargaggaaggtgarggtgggcagtaagaaattccaagcacctggtttccatyactggagccyttgctggaccagtraacagcgttwcagtttctaaaattcyaatctaawgcackcccaaagcttctgarttcaratggccatctkgtasccaygacymgaagmytkaggcarrtggcmcgaaatmgcswgcctggtwcwggcargactrartgtctaggccgtatgaswrstrggcttksctcagaggccccctttcccgagcctggccctgtcacctactgaggacttgggtgggtggcagtgctaggaagcattgagccactaaatgactcagcaaacccttgtcaagcacctcggtgcccccagctctgctgagtcctctgccggattgtcttgcctgtatgctcatttgaccctgacagtgatcttcagttccccaaggctccaagagctctgtctcctctgagcctttgcacatgctgttctgtctgttgcaacactcttctccctcccttctgctttttaattattattattattattattattatttttaattgagacagagtcttactctgtcacccaggctggagtgcagtggtgcaatctcggctcaccacaacttctgcctcccgggttcaagcaattctccagccacagcctcctgagtagctgggattacaagtgcgcaccaccacacccagctaacttttgtatttttttagtagagacaaggttttgccttgttggccaggctggtctcgaatcccgacctcaggtgatccgcctgcctcgatctcccaaagtactgggattacaggcatgggccaccttgcccagcccatttatcttcttggcatatggaatatgtatgtaatgtacatgtaagttgttgaagtgtaatatgttgaagacctgtgagcctccctcctaatttcagagtgagaacattgccattaactcacctctgcctgtgggtgggtggagggagcccactgtcctgactgttgtcattgtcattctgtgttttttattttttgcggggggcgggggtggatgggtgagggacaggtgtgtcaggttcaataaaaagggaaagggtcatcaggtggcctttttaaaagttttatcaaccatgtctgcatgctgaaaagcatggtgtttcgttctgcctgtttttgagtttcataaacatggtattgtgaggaaattcctgggtcttggtttttcttttctttctttttttttttcttttgagacagtctcgctctgtcgtccaggctggagtgcagtggcataatcttggctcactacaacctctgcatcctgaattcaggcgattctcctgcctcagcctcccaaatcccagctgggattacaggctcctgccaccacacctggctaacttttttgtatttttagtagagacagggtttcaccatgtctgtcaggctggtcttggaactcctgacctcaagtgatccgcccgcctctgcctcccaaagtgttgggattacaggcatggattccttctgatacatttcacctggagtgctgggatgacaggcgtgggattaccttctgatacatttcacctggggcgtgagcaagactttcgctagagtctggagctaggaacagaatggctggtcatagttgatgagtacatttggcttctcaaggtaatgccaatctttctgaagtggctctcgccaccttttacctgactgactcctgcttgttctccaagagtctccttcctggctgtctttccttcagcacctacttaggggagcagcagctgtgtgcctagtgtagttatgttctggggggcaatgcgaacaagactcacagtccctgccctctagtggccagtggtgttagatggtccctctttcaggacgcccccaaccccaagtctgggttaggggtttcctttgccccagctctacctactctggcttgtcactgtctagggatgggtctgccttcccgactggaccaggactcctgtgtggacagagaccaggattagggttgtcttggacgctgtttccagcatgaccctgcccggggcacagagcaggtgctgggtgaagcaggtgctgggtgaagcaggtactgttgagcttgaggcagttggggtcaagaggaagaaatggattctagtatccaggactttctggagtaggacctggaccccaaggccatgtaagcccaaagcctcatactttccctaatgcctgagtgttcaagattcctttacctgtgctgggctctgtggcagagggaggggtcacagctcctgccctcgacagcttagagaagagtcagtgcctaactacacaccccttccatagtgtgcagggctggggatgtgcggctggcagggtcctcacagagaaatgtgaagcccacccggccctctgggagctcaagtgttggcatgtcttttctgaagagggtgagggcaggaagatgtgcattacccttagaaaaaaagtagaaaaggccagccttctcatgcagtgccagagcagttagggctgtatgggggccactgtgggcctgtagattcgtaacaggaatcataatagctagcgttggtggaacacccactgggtgccacgcatggcgttgagccctccgtgcatcagctggttttatcccatccatatcccacgaggtaggtggaattgctgccccattttaccaatgaaggagagatccagctcctcacagctagtcagtggcaaatctgaacttcactcctggcagccagagcccagcccctgccctgcacgatggtagcagagcctgtctgcaggcaccaggcattcagagagctttacctcctgtcctcttgactcttcatggcaaagctggaaatggggagactgaggaacagagttacttggccccagtgctgcctctgatttgaggaggcagggtcagccctgggccatcgctgcctttgtccctgagtctgcgttcccctccactccgtgagctcactcagagagttctctccgccccctcaccactcttggtgattatttatccccaggtcttcacttcggcaccatcaggtgcccagccctgggtaaatatttgtctcagggcagacaggagtgggtgtggtcagcgtttcagagcccgggggcaggtggaggcagcaggtggggtggtgactgggggcccctggctggagctggtggctctgcttgctctttgctcatccagcatccactctcccgggggctgctgaggcgttggcctctgcaataacaggggcttccgtttgccacgcgccagccccacactagacgctttacacaagagagttcagtggctgcttttagaagtctttgtgtgtcagtctcagtctcattggctccattttgcagatgaggagactcagccatgaagggtcgagagccattgcctgtgtcaactggggtctgttgagttatcagggccagaatccacctggggccacaggaggtgaatgagggtgttcattggatggaggccaggctttgcctgttcccaggggtcctgaaagctggcaggaaccaggtctgccacctgctctctggaacacatgcactccttgttcctctttctctcttcagaacgtcttccactaggctggccatgggccacacaagcccagccctcctggtgtctggaacaggaccacccagtccagccccctgacccgggcagctcatgcaggcttagctaggaccccacatcctccctgtcaaatgggcgatagagggccagcccacgcttgttggggtggagggcagtttttagaggaggctctgcagacaccccaaataggcacccccaaatacaaggtctgactgcaaaggccatgccctcactaggttgctgttacatgtgtttagaaggtgcattcacaggctgggcatagtggctcacacctataattccagcactttgggaggccgaggcaggaggatcacttgaggccaggagttcaagaccaccctgggcaacaagtgagacccccccccccatctccacaaaatataaaaaattaaattttcggaaggtgcattcacatcacaaggcagaaagtcactagtgtcctcagatgtgtacatccctttgggaagctccttccagctggggggcttatggaggccataaaggaaccccctaactccccctacacatcccagcagaaagccctgggctaggggacagtcttgggcccttgtgttctgagagtgttattagtctccaccacaggattggctgtgttttcttagtggttcaggcatgcattcagcgagtattgagctcagtgcccagtcctgtactggggacacagcagtggcaaggcaagcccggccctgccttccaggcttattgtccagagagagggaagtgtgggaaacaagttggccaaccagcagacagcaccactgcagattgagagaagggtctggaaggaaataaaccaaggctggaacagaggagacagtggcgaggctggtgggtaggtacctggcttgggtcaggatattgaacgccttaaactcttgggtgaggcatggggtccaccaaccagatgaagtgggctttgaagtcaggcctacctgtgctgtgtgtccttggcacatgctccatctccctgcgcctcagtttcctcctttggaaaggatgggggagggatagctgtaccccaaaccgtggcatgaacagaaaggtcaagggtttggctaagagtgaggattgtggagccatagactgctcaggctcgaatcccggctctgacttttactgattctgtggcctcagtttccccatttgaaatggggataataaaccctacctatcttagggttgttgaagacagtaaatgaggtagtatatgtaagtgcttgccattgctcgtaaaaattatttatcgttaaaagttgcggccaggcgcagtggctcacatctataatcccagcactttgggaggccgaggcgggtggatcatctgaggtccggagttcgagaccagcctggccaacatggtgaaaccccgtctctgctaaaaatacaaaattagcctggtgtggtggcgggtgcctataatcccacctactcgggaggctgagggaggagaattgcgtgaacccaggaagcggaagttgcagtgagctgagattgtgccactgcactccagcctgggtgacaagagtgagactctgtctcaaaaaaaaaaaaaaagttgtgtgtcacatggggggactcgggtgcttagcacactgcttgactggggacccagggattaaggccttgacttccgctttcatccaagcctgccattgaccttacatgcagctgctgtgtgtgaggcgctgtggcatgagggaaggtgcgcccaatctgccttgttccttccgtcccaagagacttggaaagccatgagtgtgttctgaccgcatctgtttctgtaacaggatcttcagctgcggcaggcagttgggaaggtcaggacgaggggaagggaaggcaggcctgtggcacctgccatctgcgcccttcactggagtgggcaggccttgcccacatccctgcctgaggcctggggtctggaggcctggctccttgttggctatgtaagcctagcccgccccctggagctggccatcctgcagcatgtggccacggtacccactggctgaatggtggtgcctccctgccgggaagggcagagaagagcccctctcacccaggaaactgcaggactcacggcctctcagcaggcctgaggagggcacgggggtctgagagggaaggaccggccatcccagcctcccctgagcaggctaactttccaggacgcattgcgggctcccttccctccagcccgtggttctctggggagaagggaagggtggacgttgtcttcatttcccagagtgagtcggtgcattcgttcattcatagactcacagcgacagacaccacagtgacgtccctagactcagggagcccttggtctaggacagaaaacgagcaagtagatccttagagattgggacgtgtccagtgaggaggcagagtgttgtctgggtgtggtgtgggggatggggatgggggtgctgctacagaaaggggtcaggagaggcttctcagaggaggtgactttttttttttttttttttgagacagagtttcgctctttttgcccaggctggagtgcagtggcacgatcttggctcactgcagcctccatctcccagctcaagcgattctcctgtctcagcctcccaagtatctgggactacaggcacgtgtcaccacacccggctaatttttgtatttttagtagagatggggtttcaccatattggtcaggctggtctcgaactcctgacctcaagtgatgcacccgcctcagcctcccaaagtgctgggattacaggtgtgagccattgcgcctggccaggaggtgactttcgagttgagatctgaatggcaagtcagctgcggcttaagctgcaggaggggagggaagctgtcagagggagggaagagcagttgcagacccggaggcgggaacaaaccacaaagcctgtagagtggctgaggaggcgtgggcgagccgagggtgagccccggtggagtgctggcatcagggggccttgtcctgggctgaggagttgaggttttactctcagtgcagggacaggtggtgccgagtgaaagcctgtggcagcaaccagcccgctcctgcacggtctcctaagctaattgtgcgcctgctttgggtctgaatggcggggactgcacaggacgtgggttttccttctacggtgggaggtgatctcagggagtctccctgcaggtccccaccaggtcttctgtgtgcctaccatgggcatgcagttctgaagcgctgactggtggtgggaaacctagcctggagattgtcccagccatcccacccaaggcagggacaggccagtggggctacccgagcaaaggcttagggcagctggtagaccgggctgcaagaatgaggccgcagagttagtcttagagtagcacctggcaggaggctggctccgtaagccagtgctcgtccttggcattgttgactcagtggctcagctgatgagcccgaggctgctggggaaggtgtcctcctcagccttacagctccagcccccgcgtgatccgcgtttctcaggcctctgggttactgagaggctgttgggggtggaggtgcccagcggttgttcactgggaagaagaactcaccaccagcgtcccttcatttttcccaaggagtcacaggcagaggtttttccgaacaggctcagcagccagaagtccccgcctgggcttccaactgcctacagaggtagctgcagccctcccctcaggctggcctgtgtcactgccctattctatgtccaggcctcccggcacccagccgctgtccccatgagtgcccaggggagctcccagtttagcagggggagagggttccccagtgcagagtgggtgggaagcccggggcctgtgacctgtgtcacagggcatctgaggatgttgttcctggaaggcaagtgtgtggccacggagctgactttgggctctcatttaggaggctgactctgaaggtcatagtggctcagcagtgaaagaggaggatccccacagtgtgtggtctgtgtggtcactcagggatgtgacctttctgaccctcctcttctttgtcttgggttgggggtcccggccatatccccttcccagggatgtgctaaggtttcagggagctcgggtacataaagggcttgcctgagataactgcgtagtaaatgacagctgtcagtggactccctgccgaacgttgggacaccacagttacggacttgtgccaggagccccagcttcctgccacccctcaccgtgtacctcagagttctcctttgacaaccctccatctggctgtcctgtccctcaggggtgggcatgaggcccaagttccttccttcctttagcccacgttcactgagcacctgctggccgggccccagggagccacccaggtggctgcctccacagccgggctgggctttataactaattctgtcgtgagagactggccttggtgccagacctccctcccggcccacctgccgcctctgggttccttgtgggccaccgcctctgagcagctgctgcttttttttttttctcatttaactttttgttttgttttttggtttttgagacggagtctcattctctgtcactcatgctggagtgcagtggtgtgatctcactcactgcagcttccacctcctgggttcaagcgattctcctgccccagcctcccgagtagctgggattacaggcacgtgccacaacacccgtctaatttttttttttttttgagacagagtcttgctctctgtcacccaggctggagtgcagtgacacgatctcagctcactgcagcctctgcttcccaggttcaagcgattctcctgcctcagcctcctgagtagctgggattacaggcatgtgtcaccatacctggctaatttttgtattttgtagagatggggttttgccctgttggcccgactggtgtcgaactcctgacctcaggtgatctgcccaccttggcctcccaaagtgctgggatcacaggcatgagccacggtgcctggcccgtttaactgtgttttgatggacattttcagacacaagaaagtaggagtataatgagtctgatggaccgacccactttctggcttcagaattgatgactacatggccaatctgttcctgcctatctccatgccactctcacctgcattattttgcagcagctctaagatagctatcattttacctatacattgcttgtgaaacagtgggaacactcagccccaagccggcaccctctgtcctccactgtcatctgccccaggcccaggatcagaccactgggaaagtggccaggtagggctgtgtctcttgtggctctgcacacatgagaggtggtgggtgtggtgctcagagaagagccagctccaccccccagcaccccgcacaaccttgctgtttgaaggaggccgccgccccaggaggggctttaggggctgccaggaagcccggagaagggcctggggtccctctttgttcctggttcccggctgcttcactggctactccatctctgtgttcatttgcttttaaatgaggagcacagattttttattttccccttctttttttttttttttttttttgagatggagtctcactctgtcgcccaggctggagtgcagtggcgcgatctccgctcactgcaagctcctcctcccaggttcacgccattctcctgcctcagcctcccaagtagctgggactacaggtgcccgccaccacgcctgactaatgttttgtatttttagtagagacaaggtttcactgtgttagccaggatggtctcgatctcctgaccttgtgatccgcccaccttagcctcccaaagtgctgggattagaggcgtgagccaccgcacccggctttccccacttcttgcataaagggtagcattcatgagcataccgttctgcaccttgcttttttcatttgtgtcttgaaacctgttccctgttggctaagagagcgcacactcattctctgtggcggcagggctccactgcgtggatgaactctggggagctagccggtccctgctggtggatattgtggttggttccggttctgcattcacaagctgctgcagtgactgtccttacatgtatgatttttcatctttgcaagtatgtctgtaggattaatctccaggtgtgtaattgctaatcaaagggtatatgcatgttacttttttttgagatggagtcttgctctgttgcccaggctggagtgcagtggcgctgtctcattgcaacatccgcctcccaggttcaagcgattctcctcccaagtagctgggattataggcacccgctaccacacctggctaatttttgtatttttagtagagacgggggtttcaccatgttggccaggctggtctccaactcctgacctcaggtgatccacctgcctcagccttggcctctcaaagtgttgggattacaggcgtgacccactgtgccccgcacatttgtacttttgactggtcttgccaaattgcctttgagacggaaccatgtccttggtcaggtcctttctcatctctaagcgtcccctggaaagttggggagataatttctatttctcagggccattaggaagtggaaacgagatcgagtttgtcaatcgcttagttttgggagtgggcgcaaagttacggctccaccggtaaagcacagtagaagggccccaagcagtgtttgttctcttcccccatgcctctctgctgagtgccactggggattgtaggagtggtgggagagcgtggggatgattactgttgggaaatgcatggcagtggctggaagagggggtcagaagcacagacctgcatttacactcacactctgggatgagggactttcctcctcagggcgtctgtctccctgccatgggaggcagtgcatgtgtcagccatggccctcggctgtaagcccagaaacagacccctgcagaatttgtagcaagggaatgtgtggggaggatgtcaccaggcaggaggacagctgggccctcgcatgggcgggattgaggccactggattccctaggtagggagctccccaaatacaggaagaaggttagaggcaggaagagccttttctacccaggaaacctgaccagtgccacgcagtgaatatacagggtcctcacgcaaggacctgagagatgtgtgggcagctgtgtgcagtgtatacagggagtccaggggctggtgtgagccctgctcttgaggggcctctggatgcccgcggtggggtgctggggcctccacgggcgtcattctgtggttgctccaggattggacttagaaatctgggtttgactacatatcaggctgccctggggcccctttcagtaaagatactcccctgagaaatacctgcccttgggaagcccactgcattgggcttacatgactgatcagactctgattctgtgtggagcagcctggggaagggcttggaggcgggagtgaggatggtctccacgtgggcagtgtagacgtgtggttttgcagggatagagacgtgcagcagcacatccgcagaggtagcgaggccttgggggtgtggggttcccacagaaagctctgtgggtactcttctgcctcctcctccctatttcaggccccaggaggccttgtgtggttctgtccctcccctgccccccaactgaggccgtggcattgtgggagcagaggacggaactggacacctagtgaaggtgcgtagaaggcatttgccccaggctggctctgggctgagcacacccattggtgacctcatcacgtgcacaccttcgctgcctgagtgcagggcacccaaaagcctgccatagacaagaagggaccttccctgagttcacccagctggccctgtctgagttggggactcacacctgtgctgactccagagacccaccccagccccaccttcctgttccttcagtcaacacatatttattgagcacttactgtgtgcccagtaaagacccttctggggatatttcagtgaacaaaaggggtaagagttctcccctcattatagcataaatgcacagatcagtacgcttcctgctgggtcatgagaagtgccacctagagaaggaagcagggattcatagtgataaaggggctgactttttggagggtggccagggaaggcctttgaggaggtgacttgggagtgaagacctgcaggcagggagggaaggagccgttggggtgtgaggaagaggggtgctctgggcagggggtaacaggtgcaaagaccctgaggcactgtgtccagatggctctgccactggcaaggatcaggacctcaatgactgtagcagcccctccccagcacccccaagtgaggtctggccatgcagctctcccatgtgcatgctttgcctcccgtgctccataagcaggaccttgacccctccagcctccttgctgacccctctcgtctcacactccaggtcccgatctgtgcagctcactgccagatgcatcaggcagcctcctgcacctgcactttcttcacaaagttccctctgccagagacgccttttgcatctttgtcatctctgagacttttccagatgcctcccgctgcagctgatcccagcctggccatcctccccgcctccatgtcccctccctccctccctccatcatagccttgatgctgttctgccactgcccctggatttgtctcactgattgtgcagaaggctctgggacagagctggcttgtgggggattgggccactgcctattggaggcatttgggggctgtcccaggggtgagtgcaccccaggctggaccaggtgcccacacctctcccgcccagcactggcacctgtgaagggcctctggaggctgggtcttcctgcaggcaccaggaagaaacctacgagcgcatccttgctgagggcaggacccgctctccacatcctggaaacccaacagagaaagacagtctctctggcagcctccctgtcttgaagttcgagaaggctgcatttctaggctcccacaacctgtctgtccggtttgaagccggggcctgagggcttcagggtactgatgcaggacagacagctctggttcaaacctccctctgtccgctcccacaggtgtggcctcagaagaccattccctctgtagcgtggtagaggctggaaattctactctgcaggattatgatgcggattaaatgcagtaatcgagtgtttggcagagtgcctggtagggaaggggttcagtaaagagctgctcgcaccattctgtgcagggaatgctttagggcatgttttagaattttagaacgtgtttcactacatgagtagcttcttgcagctttgaggccctggcatccctctcccctgcctgcaggcttccttgttcactgggccaagtccccgcagtaatcttcctaagcatggagtagaccgggcccttcctggccagaacatccccatctaccttcagggtctactgcagtggccagatgtgagcttctcctctgtccgctcactcaccttctctgtgcctgtcttggccccttctctgtgcctggctggccccatgtggagcaatgttggggtaacagtgtggaccacagaccaccccatgctgtcttcctaggactcatagtccagtgggggagacacacaggtctccagatggtgacaactcagaggggacagggctgagacggggagcccagagggtggggcctgacctaccgtggggatcagggagggcttcctggagaaggcatccctaagctgagaattgaagaagtagtaagcagtgagagcatgtaccgtgtaatgtgtaaaggggagggagaatgtgaggtgctgggaagcaccgggcccttcgggggacgggaagaatttgggtgtggccagagcacagtgccccatgagtggagaggtccagattgtctatttttcttttcttttttttcccccaatgatcctagaaattctcccaagagaggtccagattttttgacaaggctgaagggcggcccctgagacctgactctacctgtctgcctggcctttcctcagtccagtgcgtgcacggccccctcctcgctctcacgcatcatctgtgtgctccttccctgccagacaagaacccctggagggcagggaccagttcagagccatccctgtctccccagtgccagcacagagcttggcctgagtaggttttggggactgggcttggtggctcacacctgtaatcccaacattttgggaggctggggcaggaggatcacctgagcccaggagttcaagaccaacctgtacaacatactgagacccggtctctacataaaaaaagaaaaaaaaaaaaaactggccaagcatggtagggtgtgcctgtagtctcagctacttgggaggttgaggtgggagggtcacttgagcccaggagtgcaaggctgcagtgagctatgattgagccgctgaactccagcctgggtgacagatggggaccccccaaaaaataggttttgggaaatgtttaccagatgagaggcaagacggaattctcctaaattcgaagcttggaattctcctaaattcgaagcctgaggcagaatggttgaagcaaaaagaggagatttgttgtcttatgggtctgaagggtcctgaatagtgtggtgtcaggcacagtatctctttatcaaacaatatctctttaatctctgagcttggccgggcacagtggctcacgtctgtaatcccagcactttgggaggccgaggcgggcggatcattaggtcaagagctggagaccatcctggccaacatggtgaaaccccgtctctactaaaaatacaaaaattagccgggtgtggtggcgcgtgcctgtagtcccagctactcaggaggctgaggcaggagaattgcttgaacctgggaggcagaggttgcagtgagccaagatcacaccactgcactccagcctggcgacagcgagactccatctaaaaaataaaatatctgagcttggctttcctctgagctggcttcattcgcggaaggctgttccctcctgatgggtgcagggatggctgccagtagctctagaaatgggatgcagtcttaaccaccctagtgggaagagagctcctctttcctgagagttccatctcagggcgtaggaccggctgtggctggctctgtaaccttcctgtccctgaccgatcattgtaacagaggttgtgggacggggcacctatccactcctagaacctttggggaggacagcggggagtcaaggtaaagtgaagaggcctatccaggctcctggggtgagagagattgggtgaccaaggctggtccacccaggggaagacaggaagagaagtgggccattctggcctcagacctcttcgtcctttcccagaccccacgccaaggcagagctccctgtgggatgagtttctcacttgacctgaaatctctacttgtggggctgctgcaagtgcacaggcttcaggaaaggtggaccacaccccctgtgccccaggctccttcccgagggtgtgcagcccaccatccagataggggtggatggtgcccaagtcgtgggggctgacaagcatggagagtcctgcagagaggcccagcaccggattcccaggctgctccttgagacgctgtcccacatgggccggtcactcacctgccatgagactcccaactgggaccttccctgcagagcctgtgaggtggaacgatggtgatggtgcccccttgtggggtaggtgcatgtggcaggcacagagtggtggcagcaactgtaacatacggttctggagggcagggacaggggcccttcctgtgtgccttgtggtgctgagtgccaggctgggtgagctcaccaagccctccctgggaaggtgctgttgatgcagcagggaggcccagggcagtcactgctctgtgctgttggcgacggagcagggattggaacccaggcgcctggcttcgaggcccgcatgctgtggggaaatggggctctgccatgttggtggttatttattgtcgtgaacaagagctcaggcctggtttccaggtgtgactttattgcaccctcgccctacctccccggcttgagaattctggaaaataccacaataagtgtttcttttctcttttgagattatgtaaataatacttgcctccatgctcttaaaagaaaatgacatctctatttccatgtgttgcggtgtttcctggtttgggaccccaccagctatccagtcacccaggcttgaagccaggttcttcccagcttctctctccaccctgcccatccctgtgcatgtagcagtgaccaggtcctatcgattatctgattatctgccggaagcctcaggaatgggagccttctgagtcagcacatcaccaggagcacggcctgtggccaggctgctcaggggctggtgatgttggtttctttcaccttaatgtgtgagttgtgtagtaatacggtcctatatcacttaatgatgacacattctgagaactgcgtcgttaggtgatttcatggtcatgtgaacatcctagtggacttacacaaacctaggcctggtcaggcctggtggctcacacctgtaatcccagcactgtgggagttctagatgggcggatcacctgaggtcaggagtttgagaccagcctgaccaacctggtgaaaccccatctctattaaaaatacaaaattagcctggcgtggtggcgtgtgcctgtaatctcagctactcggaaggctgaggcaggaggagaatcgtttgaacctgggaggtggaggttgcagtaagctgagatcatgctattacactccagcctgggcaagaagagtaaaactccatctcaaaaaaaaaaaaaaaaaaaaaaaaccctaggtggcatgcctactgcacacctgggctacctggaatagtctagtgctcttgggctccacacctgcacagcatgtggctgtgctgagtaccctcggcaagtgtaacacagtggtaggtatttgtgtatatgaacgtagacaagggacagtaaaaatatagtgggaaatcttatgggaccaccggctgcatatgcagtccatcattgactgaaatggctttatgcggcttatgactagacctgtatgtgcctcagtattcaaaagatgtaaaaaggtggacagagattcaacataaagaaatgatcaatgtttgggccgggcgcggtggctcacgcttgtaatcccagcactgtgggaggccgaggtgggtggatcatgaggtcaggagatagagaccatcctgactaacacagtgaaaccctgtctctactaaaaatacaaaaattagccaggtgtggtggcacatgcctgtagttccatctactagggaggctgaggcaggagaatcccttgaacccgggaggcagaggttgcagtgagccgagatcgtgccactacactccagcctgggcaacagagcgagactccatctcaaaaaaaaaaaaaaaaaaagataaatgtttgaggtgatatgctaattaccctgactcaatccttgtatgcatttatcgaaataccacatgtaccccataaatatgtataataattatgtattaataaaattaaacattttaaaaaatgtatatagagagaaggaagtttctctctccctgtcctcctttggctttgccagctcaccttcctaaaagcagtcacctagtttattgtatgtccttctggaaggatctctgatggagcttagctaatgacaatccacagcagccacagcccaggccagccgacagagtttgtaaataaagttttatttgcacatgtccaggctcatttgtttatatactatctattactcttttcatgctacaaggcagagttgagtagttgctgcagagcctagtctgatcatttaagcaaaatattgtgatgcctgcagctgtgtgtgtttaaagtcaaggcagggtggtagaggcagcggcagcagcaggcccagaggcagcggttgggtttgcagcgagaagacaaggttgagtcagtgtgtttgcgagagctggaatcgaagcctcttaaaatggcagatgatttggacttcgagacaagagatgcaggggcctcggcctccttcccaatgcagtgctcagcattatgtaacactggcttcgtggtgctcaaaggctggccctgtaaggtctttgagatgtctgcttggaagactggcaagcacagccgcgtcaaggtccacctggttggtattgacatctttactgggaagaaatataaaaataactgcctgtcaccttataatgtgggtgtccccagcatcaaaaggaatgactcccagttgattggcatccaggaaggtacccctcactgctccaggacagcagggaggtgcgagaggaccttcttcgtctgccagaggagaccttggcaaggagatgagcaaaagtaccgctgtggagaagggaccctgatcaccgtgctgtctgccatgacagaggaggcagctgttgcagtcaaggccatggcaaaagaactggctcccagggtgacagtggtggcagcagtgatcttctgagactgcagaggccccctcctctggccttctgtaggctggactcttcctacacaatgtatttgatgttttattttgtttttcccaccccttcaatctgtcggggagcccctgcccttcacctagctcccttggccaggaacaagcaaagccatggccttggtgaagctgccatccttttccctgctcgcactacagccctggttggggggagacggtgggcgatgcttgtggtttatttatttgagacagagtctcactctgttgcccaagctggagtgcacggggcaccatctcggcttactgcaacctccacctcttgggttaagcagttctcctgcctcagcctcccgagtagctgggattacaggcacgtgccaccatgccaggctaatttttgtatttttagtagagacagggtttcactatgttggccaggctggtcttgaactcctgacctcgtgatctgcccgtctcggcctcccaaagtgctgggattacaggtgtgagccactgagcccggccttatttatttattttaattcaatctggaatcagaaagcggtggattctggcacatggtccttgtgccctccccactcacccctggtctggtcccctgttccccatggtcctataccctaagcacgacccccacagactaaggccagccccctgccgtacctgtgcctctccccaaacccctttagatggggagggaaaaggaggagcggggaggggtcctgcccccatgggctttacccttccctgcggtctctctccccaacacatttgttaaaatcaaacctgaataaaactacaagtttaatatggaaaaaaacaataatagtcgaggcagacctgggccttttagtctgtactcttgcctctgtgagccttgactctgaaaaggggatagtaaaaggatgtctcttggggtggctggggggcttctgtggggtccaggcagcacaggacctaaccagcagggtgccaagcagggggatgcctgggctgcaggcattgactcgcctgtgtcccacaacccctcttggagctggagcactagcgggggctcagctgccaaaacccagggacaggtgaggctgtcaccatccaagatggcaatctggtgtgccattcctgactgccaacctgcacgatcaggtcccctccccgtgagtactacaggggaccccactcctgcagaatacaatcctcccatgagcctgaatccatcctgttgctgctctgcccctcgcccccagtggctccggtctcctgcagaatgagagcgaagtcctcaccagggtccacggggtcaccgtcccacatcatccccagtgctcccctcccggtgtgctttggcgccgagcctgctcccaccgtcacacttaagcctgccccagtggttgctgcctgccacggggtttgcacagggactgcgcagtgggcctcctgaatgaagacccagacctgagcccggtggggcctctgggaacactcctttcaaggccagctcaccctggctcctttctgttcattccaaaataacaaaataacacctgcattgcaaagcgtggttattctgagcctggttgccatcacagtcatatggggacctgttaaaatctgggcccctgggccctagctaggacctcctgactctggtgctctgtgaacctggctcgcagacgtcccgatttcatgtggtggacactggggcatgggaaggtcatttccagccagaggtagcatggttgttacggagcagccctaaatattcctgctccaggcttgtctggacttcctccctccccatccctcctctgagagttgacaccctcccactgtgtcccccagcccgcacagtgttgcttcctggtgttttgactcccacttggatgactgtgtctgtttcccccgccctgctccaggctggcacggatggtgtgagtcatcaccgccccctgatgcccaacctgtccttgcatctcttgggtaccattgcacctgtgtgcaaatgccagacagacatctctctgcctgtcacctgatgcccggcgtcaggtttctctctgtccctttgtgagggccacagccggcgggagtgggaggcaagctctgtttgcccttcatcctctccctggggagctggctgccacctgctgggcgagcggcagagccccatccctgcagcagcaaggccctgcccgccagctgctgcacagcagcatctctccctggagctcatgcctttcaccatcccacccagggctccccacaccctgcctccgccccagcccttcccctcctcaggccagacaagggagccgagagttgagctgtgctgtggtttcaggtcaagacagtcctggggtgtgttccagtcctgccacttccaggctccatcccttgggcaggtgtcttttcttctcccagattgcttccctgataagatggaggtctagttatgccagcatcataggggtgctgagctggccaagtgaaattgtgcatggaaagtacttaggagctgggtgaggcggctcacgcctgtaattccagcactttgggaggctgaggcaggaggattgctggagcctgggagttcaagaccagcctgggcaatatagcaagaccttgacccctttgttttttagaaagtgcttattagcactatgcattacacagagtaagtttctgataccgggaagtggctgccaccatcaccaccaccatcatcacgtttttctccatttgtgtctcctgctgactaagccacactgtgacactggtgccagctacttcatgggtgctctcacgtcccttgttgcctgcgaccccacaggtgtccctttcagggagggaaagaggttgctgtggtcatttaacacagcctcggcaggccagggatggaactcaggtcttcttattccaagccgttacctctgcagatccatccccaacacatgcctgctttgtagaaaatactcacacacccaaacacatgtgttttgaacacacctgtcctcctctctgacagccacttgaattctggtccctgcttaatgggccttcagagccttggacttgagcaaatgcatctgagccctgaccttgagacccacactcacacacgtgcccacccccacatacttgtgtgcacatggtggatttactgcatgctggaaaaacaagaggaatgtaaaagctaaggagcagttacgtattttttcttttcttttttttttaagagagtctyactctattgcccaggctggagtwcagcgacacaatyacagytyactgcagyctcaaactyccaggctcaagctatcctcccatctcagcctcccaagtcactgcgaccacaggcatgtgctaatttttgtattttttgtttgttttgtagagacagggtctcactttgttgctcggctggtcttgaactcctggtttcaagtgatcctctcgcctcagcctcccgagtagctgggattacaggcacacactaccacgcctggctaatttttaaatttttggcagagatggtatcaccatgttgcctaggctggtctcgaactcctggcctcaagtgattctcttgcctcagcctcccaagtagctgggactacaggcacgcaccaccatgcccaactgattttttagttttttgtagagacaaggtctccctatgttgcccaggctggtctcgaattcctgggctcaaaggaacttcctgccttggcttcccaaagtgctgggattgcaggcatgagccactacccctggaccaagtgagcatgtatatgtgtgtgctaagcactggttccagggagggaccctactaactcactcactcgccacacgaccctgggagttagttacactcatccccattttagggataaaacagttgaggcacgggtcacattgctttgctcaagagtttgagttgggcgctaggatttgactccaggcagtctcgccccagaactcatgttctttttgtgtgtccgtgagaaggagtttcactcttgttgcccaggctggagtgcagtggtgcgatctcagctcaccacaacctccacctccacctcccgggttcaagtgattctcctgcctcagcctcctgagtagctggggttacaggcatgcgccacaacacccagctaatttttgtatttttagtagagacggggtttcaccatgttggccaggcttgtctcgaactcctggcctcagatgatctgccctcctcagcctcccaaagtgctgggattacaggcgtgagccaccgcgcccggcccagaattcacgttcttaaccatattgcaagactctatatctcaggtgggacctgtgagatgctgtgaagcccacctaaggtcactgagtgtgtgagagagacagcaaagatcccagccccatccctcagggccacagctgtgccctaaccactgcgcagcccttccctttggaacctggctctgagctccagcccaggccctacaccaaagcctttgaatgaactacagtcctgccatggctgtttggccttgcctgtggaataggggtcctgtggctatgctcccctggatcctggggacccacccctttatgagacttcagtcactctgcctggaagccgtgactgacaaagatcacctgcttcctgctgccttaaaggagacactgggcatcacatgaccttttccatgtccatcatggggtcatgtgggctgtgacatggcagagtcagatgggtccaagctggccctgtggtcagacgtggtggacccatcacctcccctcgtgagtccgcattgagtgcagatactgaggaactgggtgtgaaatgcctcgggtagcatctctcatgtggttagtgctcagtacgccagagtcagttattttgacccacgcctgctcatgaactgtttcacgctgccattttcttcttagccacctcctcacaccattttaaatggacaggtgtgtgtaggggcccatcctgggccagccagctgctctccctgcaactttggacaagttatcgcacctctgccccatgccgcagttttctcctctcttttttttttctgaaattttttttgtagagactggctttgttggcaaggctggtctcaaactcttggcctaaagcaatcctcctgtcttggcctcacatagtgctgggattgcaggcgtgagccatgtgcccagtctcctctctaaagtgggaggatactaatactcccgtgatggaagtgatcagggaattgaagctgtgtttatttgcattggaagtgctggggatgggcctggcgggtgtgagtgctgtcagcgcgaacttcctctctgatctgcccatgctgctctttcttttttcttattaatagattggtttcttttttatttgaatacatttggcctcatttctaagcaatagtatttgtaaaatcttagttttggtgtgctcattccttttttttttttttcttgagacagagtcactctgtctcccaggctggagtacagtggcacgatctcggctcactgcatccttcacttcccaggctcaactacttgagagtgcctcagcctcctgagtacgtggaactacaggaacccaccaccacgcccggctaatttttgtatttttagtagaagtgcatttctacggcgcttctgtaagcacttgggcggatgtgacctcctcggtctctgactctggtggtgactcctgcaaggccggacctggttccagaccctgtaggtgcccagctgaaggtgtggtctgattgctgtgtggggagtgaaggttgccagcctagaaactgggcctcaagctcactcagaggctcttggaacaaagaagaggcaccatcttggctgggcacggtggctcacgcctgtaatcccagcactttgggaggccgaggtgggcagatcatgcggtcaggagttcgagaccagcctgaccaacgtggtgaaaccccatctctactaaaaatgcaaaaattagccaggtgtggtggcgtgtgcctgtaattccagcaactcgggaggctgaggcaggagaatcgcttgaaccagggaggtagaggttgcagtgggctgagatcatgccactgaactccagcctgggcgacagagtgaaactctgtctcaaaaaaaaagaagaggtgccatcccaatgcatgagaccggctgccattgtgtcaggggttatggtggtatccaccctgatgccacagccagctctgggccagcctcctcgccccagcggtgcccacccccagcttgatcctggaccctggcaatggtgtgacatgagctgctgctaagcgtttgcagtgctaggcccgggccggactttctccacaaacgatttagttccgttagttcacccaccctgtaaaacagctacgcttctcttccccgtttaaagcttgaggaagctgaaatgtggagagttgagagtggctccagagctcctgagccaggggctaggacttgaaccctggcttcagccgccacagaggacagcttagggtgggcctggcctggctccctgcttcacagagtcgatgcgttcgctcctggatgaagcgcctggcacgaagtccgtgggcagcgctgctctgtgtgtcttgtgaattcttcttatgcttctgatagttcctccaattttgcatttcctttttttttttttttttttggaaatggagtttggctcttgtcacccaggctggagtgcaatggcgcgattttggctcactgtaacctctgcctcccaggttcaagtgattctcctgcctcagcctcccgagtaactgagactacaggagcgtgccaccacacccagctaatttttgtatttttagtagaggctgagtttcgccgtgttgccccggctggtcttgaaatcctgacctcaagtgatccgtccacctcagccttccaaagtgctgggattacaggcatgagccaccatgcctggcctggaatgatgatttttaaggcgaaacattaaataggattgcaaaggatgccagttggaatatcattagctaaatgctcttcctcactgaattgacatgtgaagcgataggatgtagcagcagctgtaataaggccttcagtctcagagtagtgatgggcattcagaatctgcagtaacttgatgcaatgggaaaatatctgtcgtttcttttcatgtcagtctcaaggtctgctaaacactgtttcttttctctctctcttttggcctctgttaataagaaggaaatgctaaatttcagttccattcatgaaaataaagagataagtgtctcccctcaagttcgtgggccctttgggggtcaaatggttaagaccagggcatgcatgggcttgtccatggcttggggtagctgctgcagtcctgggggctgccttcccaggcagggcaagctccggtccccactagagctccagggtcaccaagcacatgggcctttgtcagacagctccctttctgtctgcaagaggggcacctgccatcagctgatcccctgcagctcctcccaggcctccacccccaaggaggaggaagtgctcaggcagggaccaggcctgacctctggggaggctggcggctggcctctgtcggcttctttcctccagcaccgcagttcagcaacccaccgccacccagcacagtggccagagcggagtcccagggtctgatgttagactctgctctggaccagccacctggtcccagggagacaccatactttacccagacctcagcttcttcccctagaaaatggggcagtgcttgatgagaccaggggtccagagcccctggcctagcagggtggcaggaggaggagtccacacggagatattactggactgggagctctctcagggactcccactgcgtccagcagcagcggattggcagcagggcgaggggccccccccccaagaagctgccagcaagccctcttcctggcccccttccctgcccattgtggcatctccatgcccaatatctgctggcccgaagatctttctaacggccagtcctgacctctccctcttctgctcctagcctttccttcctgctccgctggtcaccctgaggtaaaatccaagctctaatagccaaaaactggaaacagtacaaattcctgtcagctggtgaatgggcaaacacaacgcagcacatcctataattactcttcagcagtataaagggactgaaactcacgctcattatgctcagtaagagaagccaaccgcagaaggccacacagtttcaattccattttaatgaaatgtccagaaaaggcaaatctgtgtagatagaaagcccagccctcccttccgcatggtggcggctgtggccctccagggaccggggctgcagctgttgggtttgggctacgtcccttcattcatgctgggagccactgcctgttagcctgggaacacccgggaccaggcctgtctcttccaactgcttctgtgtcctgcgtcaaggggccgggccctgaatagcgtacggcgatgtttagctgttgagagtgttttgggagtggggatcctgagaggcacgtggcattgtagttgagagctgagttcaaagcccggctcgcatatataccaggtgtgtgatcttgggcaaggttgtttctctgagcttggtttcctcatagggttgaagtgaggattcattctttcacccaaaaatacaaaaatacaaaaaaaaaaaaaacaaaccaaggaccaagtacagtggctcatacctgtaatcccagcactttgggaggctgaggcagaaggattgctgaagcccaggagttcgagaccagcctgggcaacatagtgacaccccatctccaccagaaataaaaatgatctgggcgtgacagtgcaagcgtttggtctctgctgctcgggaggatgcttgagcctgggaggtcaaggctgcagtgagccatgttctcaccactttacttcagcctgagcaacagagtgagaccctgtctcaaaaacaaacaaaacaccgagacagtgttggagacatggtggtgaccaagacagccccagtcctgtcctcctgggctcccgggctagtaggggaggtggctgatgtgtagaaagattgtgtgctgttcattgtgtatttgtgtgaaggtgcttggagcggaggtgaggcgtggagggcagtggtgacttggggtgggggtgcccaagggcactttacctcgggcagtggccagcggggggcctgaaagggaggacagagctcaggcagcctgttgttgggggagggctgaagagggcagtatgggcagaggccttagggcgggagtgggtggagccccatgaaggactcggggtgtggacagtcacaggcctgggtcccctgtgcctgcagcccagaatgtgaccgtggacgaggtcatcggcgcctacaagcaggcctgccagaagctgaactgcaggcagatccccaagctcctcaggcagctgcaggtatgggcgggacagggtgggtgcgtccggtgtgggtgtcaaggggggccctagggtggaaccagcccagcaggagagggcctcccactccccagccccaggtgttcatgaatacatctttgaaagcctgctgctcagctagagaatgaatcagtttcttcataaatttgaagagcacagaattc

SEQ ID NO: 29 - DNA, 160226 bp, Homo sapiens
gaattccctttttcttttttttttttttgttgagacagagtcttgctctgtctcccaggttgcagtgctgtggcgtggtcatggctcactgcagtctagatctcctgggcccaggtgatcctcccgcctcagccttctgagtagctgggaccacaggcacgtaccactacacctggctaatttttggattttttgtagagacggggtttccctgtgttgcccaggctagtcttaaattcctgggctcaagtgatcctcctgccttggcctccgagagtgctgggattacagccatgagccattgcacctggccacatttcttacttttactcatcttttaggtctcagtcgaaatgttcttttctcttatgggtcttttctaactattcctccaaatctgaatttgtatcccctgtgttttcccctataatatgcattttcttcttataactggtaaatttttgggtgatttgtttgccttcctcccagtccttgagggcagggaccagccctgttttgttcacggctgtctgcctagcccaggttgttgcataaagaatgaatgaatgaaaatatgttcattagttcccaaacagacctctgagggttggtggcattaccctcttgttatgaaggaggaaggtgagggtgggcagtaagaaattccaagcacctggtttccatcactggagcctttgctggaccagtaaacagcttacagtttctaaaattccaatctaaagcactcccaaagcttctgaattcagatggccatctggtacccatgaccagaagcctgaggcaggtggcccgaaatagcctgcctggttctggcaggactgaatgtctaccgatgagtgctgggctttcctcagaggccccctttcccgagcctggccctgtcacctactgaggacttgggtgggtggcagtgctaggaagcattgagccactaaatgactcagcaaacccttgtcaagcacctcggtgcccccagctctgctgagtcctctgccggattgtcttgcctgtatgctcatttgaccctgacagtgatcttcagttccccaaggctccaagagctctgtctcctctgagcctttgcacatgctgttctgtctgttgcaacactcttctccctcccttctgctttttaattattattattattattattattatttttaattgagacagagtcttactctgtcacccaggctggagtgcagtggtgcaatctcggctcaccacaacttctgcctcccgggttcaagcaattctccagccacagcctcctgagtagctgggattacaagtgcgcaccaccacacccagctaacttttgtatttttttagtagagacaaggttttgccttgttggccaggctggtctcgaatcccgacctcaggtgatccgcctgcctcgatctcccaaagtactgggattacaggcatgggccaccttgcccagcccatttatcttcttggcatatggaatatgtatgtaatgtacatgtaagttgttgaagtgtaatatgttgaagacctgtgagcctccctcctaatttcagagtgagaacattgccattaactcacctctgcctgtgggtgggtggagggagcccactgtcctgactgttgtcattgtcattctgtgttttttattttttgcggggggcgggggtggatgggtgagggacaggtgtgtcaggttcaataaaaagggaaagggtcatcaggtggcctttttaaaagttttatcaaccatgtctgcatgctgaaaagcatggtgtttcgttctgcctgtttttgagtttcataaacatggtattgtgaggaaattcctgggtcttggtttttcttttctttctttttttttttcttttgagacagtctcgctctgtcgtccaggctggagtgcagtggcataatcttggctcactacaacctctgcatcctgaattcaggcgattctcctgcctcagcctcccaaatcccagctgggattacaggctcctgccaccacacctggctaacttttttgtatttttagtagagacagggtttcaccatgtctgtcaggctggtcttggaactcctgacctcaagtgatccgcccgcctctgcctcccaaagtgttgggattacaggcatggattccttctgatacatttcacctggagtgctgggatgacaggcgtgggattaccttctgatacatttcacctggggcgtgagcaagactttcgctagagtctggagctaggaacagaatggctggtcatagttgatgagtacatttggcttctcaaggtaatgccaatctttctgaagtggctctcgccaccttttacctgactgactcctgcttgttctccaagagtctccttcctggctgtctttccttcagcacctacttaggggagcagcagctgtgtgcctagtgtagttatgttctggggggcaatgcgaacaagactcacagtccctgccctctagtggccagtggtgttagatggtccctctttcaggacgcccccaaccccaagtctgggttaggggtttcctttgccccagctctacctactctggcttgtcactgtctagggatgggtctgccttcccgactggaccaggactcctgtgtggacagagaccaggattagggttgtcttggacgctgtttccagcatgaccctgcccggggcacagagcaggtgctgggtgaagcaggtgctgggtgaagcaggtactgttgagcttgaggcagttggggtcaagaggaagaaatggattctagtatccaggactttctggagtaggacctggaccccaaggccatgtaagcccaaagcctcatactttccctaatgcctgagtgttcaagattcctttacctgtgctgggctctgtggcagagggaggggtcacagctcctgccctcgacagcttagagaagagtcagtgcctaactacacaccccttccatagtgtgcagggctggggatgtgcggctggcagggtcctcacagagaaatgtgaagcccacccggccctctgggagctcaagtgttggcatgtcttttctgaagagggtgagggcaggaagatgtgcattacccttagaaaaaaagtagaaaaggccagccttctcatgcagtgccagagcagttagggctgtatgggggccactgtgggcctgtagattcgtaacaggaatcataatagctagcgttggtggaacacccactgggtgccacgcatggcgttgagccctccgtgcatcagctggttttatcccatccatatcccacgaggtaggtggaattgctgccccattttaccaatgaaggagagatccagctcctcacagctagtcagtggcaaatctgaacttcactcctggcagccagagcccagcccctgccctgcacgatggtagcagagcctgtctgcaggcaccaggcattcagagagctttacctcctgtcctcttgactcttcatggcaaagctggaaatggggagactgaggaacagagttacttggccccagtgctgcctctgatttgaggaggcagggtcagccctgggccatcgctgcctttgtccctgagtctgcgttcccctccactccgtgagctcactcagagagttctctccgccccctcaccactcttggtgattatttatccccaggtcttcacttcggcaccatcaggtgcccagccctgggtaaatatttgtctcagggcagacaggagtgggtgtggtcagcgtttcagagcccgggggcaggtggaggcagcaggtggggtggtgactgggggcccctggctggagctggtggctctgcttgctctttgctcatccagcatccactctcccgggggctgctgaggcgttggcctctgcaataacaggggcttccgtttgccacgcgccagccccacactagacgctttacacaagagagttcagtggctgcttttagaagtctttgtgtgtcagtctcagtctcattggctccattttgcagatgaggagactcagccatgaagggtcgagagccattgcctgtgtcaactggggtctgttgagttatcagggccagaatccacctggggccacaggaggtgaatgagggtgttcattggatggaggccaggctttgcctgttcccaggggtcctgaaagctggcaggaaccaggtctgccacctgctctctggaacacatgcactccttgttcctctttctctcttcagaacgtcttccactaggctggccatgggccacacaagcccagccctcctggtgtctggaacaggaccacccagtccagccccctgacccgggcagctcatgcaggcttagctaggaccccacatcctccctgtcaaatgggcgatagagggccagcccacgcttgttggggtggagggcagtttttagaggaggctctgcagacaccccaaataggcacccccaaatacaaggtctgactgcaaaggccatgccctcactaggttgctgttacatgtgtttagaaggtgcattcacaggctgggcatagtggctcacacctataattccagcactttgggaggccgaggcaggaggatcacttgaggccaggagttcaagaccaccctgggcaacaagtgagacccccccccccatctccacaaaatataaaaaattaaattttcggaaggtgcattcacatcacaaggcagaaagtcactagtgtcctcagatgtgtacatccctttgggaagctccttccagctggggggcttatggaggccataaaggaaccccctaactccccctacacatcccagcagaaagccctgggctaggggacagtcttgggcccttgtgttctgagagtgttattagtctccaccacaggattggctgtgttttcttagtggttcaggcatgcattcagcgagtattgagctcagtgcccagtcctgtactggggacacagcagtggcaaggcaagcccggccctgccttccaggcttattgtccagagagagggaagtgtgggaaacaagttggccaaccagcagacagcaccactgcagattgagagaagggtctggaaggaaataaaccaaggctggaacagaggagacagtggcgaggctggtgggtaggtacctggcttgggtcaggatattgaacgccttaaactcttgggtgaggcatggggtccaccaaccagatgaagtgggctttgaagtcaggcctacctgtgctgtgtgtccttggcacatgctccatctccctgcgcctcagtttcctcctttggaaaggatgggggagggatagctgtaccccaaaccgtggcatgaacagaaaggtcaagggtttggctaagagtgaggattgtggagccatagactgctcaggctcgaatcccggctctgacttttactgattctgtggcctcagtttccccatttgaaatggggataataaaccctacctatcttagggttgttgaagacagtaaatgaggtagtatatgtaagtgcttgccattgctcgtaaaaattatttatcgttaaaagttgcggccaggcgcagtggctcacatctataatcccagcactttgggaggccgaggcgggtggatcatctgaggtccggagttcgagaccagcctggccaacatggtgaaaccccgtctctgctaaaaatacaaaattagcctggtgtggtggcgggtgcctataatcccacctactcgggaggctgagggaggagaattgcgtgaacccaggaagcggaagttgcagtgagctgagattgtgccactgcactccagcctgggtgacaagagtgagactctgtctcaaaaaaaaaaaaaaagttgtgtgtcacatggggggactcgggtgcttagcacactgcttgactggggacccagggattaaggccttgacttccgctttcatccaagcctgccattgaccttacatgcagctgctgtgtgtgaggcgctgtggcatgagggaaggtgcgcccaatctgccttgttccttccgtcccaagagacttggaaagccatgagtgtgttctgaccgcatctgtttctgtaacaggatcttcagctgcggcaggcagttgggaaggtcaggacgaggggaagggaaggcaggcctgtggcacctgccatctgcgcccttcactggagtgggcaggccttgcccacatccctgcctgaggcctggggtctggaggcctggctccttgttggctatgtaagcctagcccgccccctggagctggccatcctgcagcatgtggccacggtacccactggctgaatggtggtgcctccctgccgggaagggcagagaagagcccctctcacccaggaaactgcaggactcacggcctctcagcaggcctgaggagggcacgggggtctgagagggaaggaccggccatcccagcctcccctgagcaggctaactttccaggacgcattgcgggctcccttccctccagcccgtggttctctggggagaagggaagggtggacgttgtcttcatttcccagagtgagtcggtgcattcgttcattcatagactcacagcgacagacaccacagtgacgtccctagactcagggagcccttggtctaggacagaaaacgagcaagtagatccttagagattgggacgtgtccagtgaggaggcagagtgttgtctgggtgtggtgtgggggatggggatgggggtgctgctacagaaaggggtcaggagaggcttctcagaggaggtgactttttttttttttttttttgagacagagtttcgctctttttgcccaggctggagtgcagtggcacgatcttggctcactgcagcctccatctcccagctcaagcgattctcctgtctcagcctcccaagtatctgggactacaggcacgtgtcaccacacccggctaatttttgtatttttagtagagatggggtttcaccatattggtcaggctggtctcgaactcctgacctcaagtgatgcacccgcctcagcctcccaaagtgctgggattacaggtgtgagccattgcgcctggccaggaggtgactttcgagttgagatctgaatggcaagtcagctgcggcttaagctgcaggaggggagggaagctgtcagagggagggaagagcagttgcagacccggaggcgggaacaaaccacaaagcctgtagagtggctgaggaggcgtgggcgagccgagggtgagccccggtggagtgctggcatcagggggccttgtcctgggctgaggagttgaggttttactctcagtgcagggacaggtggtgccgagtgaaagcctgtggcagcaaccagcccgctcctgcacggtctcctaagctaattgtgcgcctgctttgggtctgaatggcggggactgcacaggacgtgggttttccttctacggtgggaggtgatctcagggagtctccctgcaggtccccaccaggtcttctgtgtgcctaccatgggcatgcagttctgaagcgctgactggtggtgggaaacctagcctggagattgtcccagccatcccacccaaggcagggacaggccagtggggctacccgagcaaaggcttagggcagctggtagaccgggctgcaagaatgaggccgcagagttagtcttagagtagcacctggcaggaggctggctccgtaagccagtgctcgtccttggcattgttgactcagtggctcagctgatgagcccgaggctgctggggaaggtgtcctcctcagccttacagctccagcccccgcgtgatccgcgtttctcaggcctctgggttactgagaggctgttgggggtggaggtgcccagcggttgttcactgggaagaagaactcaccaccagcgtcccttcatttttcccaaggagtcacaggcagaggtttttccgaacaggctcagcagccagaagtccccgcctgggcttccaactgcctacagaggtagctgcagccctcccctcaggctggcctgtgtcactgccctattctatgtccaggcctcccggcacccagccgctgtccccatgagtgcccaggggagctcccagtttagcagggggagagggttccccagtgcagagtgggtgggaagcccggggcctgtgacctgtgtcacagggcatctgaggatgttgttcctggaaggcaagtgtgtggccacggagctgactttgggctctcatttaggaggctgactctgaaggtcatagtggctcagcagtgaaagaggaggatccccacagtgtgtggtctgtgtggtcactcagggatgtgacctttctgaccctcctcttctttgtcttgggttgggggtcccggccatatccccttcccagggatgtgctaaggtttcagggagctcgggtacataaagggcttgcctgagataactgcgtagtaaatgacagctgtcagtggactccctgccgaacgttgggacaccacagttacggacttgtgccaggagccccagcttcctgccacccctcaccgtgtacctcagagttctcctttgacaaccctccatctggctgtcctgtccctcaggggtgggcatgaggcccaagttccttccttcctttagcccacgttcactgagcacctgctggccgggccccagggagccacccaggtggctgcctccacagccgggctgggctttataactaattctgtcgtgagagactggccttggtgccagacctccctcccggcccacctgccgcctctgggttccttgtgggccaccgcctctgagcagctgctgcttttttttttttctcatttaactttttgttttgttttttggtttttgagacggagtctcattctctgtcactcatgctggagtgcagtggtgtgatctcactcactgcagcttccacctcctgggttcaagcgattctcctgccccagcctcccgagtagctgggattacaggcacgtgccacaacacccgtctaatttttttttttttttgagacagagtcttgctctctgtcacccaggctggagtgcagtgacacgatctcagctcactgcagcctctgcttcccaggttcaagcgattctcctgcctcagcctcctgagtagctgggattacaggcatgtgtcaccatacctggctaatttttgtattttgtagagatggggttttgccctgttggcccgactggtgtcgaactcctgacctcaggtgatctgcccaccttggcctcccaaagtgctgggatcacaggcatgagccacggtgcctggcccgtttaactgtgttttgatggacattttcagacacaagaaagtaggagtataatgagtctgatggaccgacccactttctggcttcagaattgatgactacatggccaatctgttcctgcctatctccatgccactctcacctgcattattttgcagcagctctaagatagctatcattttacctatacattgcttgtgaaacagtgggaacactcagccccaagccggcaccctctgtcctccactgtcatctgccccaggcccaggatcagaccactgggaaagtggccaggtagggctgtgtctcttgtggctctgcacacatgagaggtggtgggtgtggtgctcagagaagagccagctccaccccccagcaccccgcacaaccttgctgtttgaaggaggccgccgccccaggaggggctttaggggctgccaggaagcccggagaagggcctggggtccctctttgttcctggttcccggctgcttcactggctactccatctctgtgttcatttgcttttaaatgaggagcacagattttttattttccccttctttttttttttttttttttttgagatggagtctcactctgtcgcccaggctggagtgcagtggcgcgatctccgctcactgcaagctcctcctcccaggttcacgccattctcctgcctcagcctcccaagtagctgggactacaggtgcccgccaccacgcctgactaatgttttgtatttttagtagagacaaggtttcactgtgttagccaggatggtctcgatctcctgaccttgtgatccgcccaccttagcctcccaaagtgctgggattagaggcgtgagccaccgcacccggctttccccacttcttgcataaagggtagcattcatgagcataccgttctgcaccttgcttttttcatttgtgtcttgaaacctgttccctgttggctaagagagcgcacactcattctctgtggcggcagggctccactgcgtggatgaactctggggagctagccggtccctgctggtggatattgtggttggttccggttctgcattcacaagctgctgcagtgactgtccttacatgtatgatttttcatctttgcaagtatgtctgtaggattaatctccaggtgtgtaattgctaatcaaagggtatatgcatgttacttttttttgagatggagtcttgctctgttgcccaggctggagtgcagtggcgctgtctcattgcaacatccgcctcccaggttcaagcgattctcctcccaagtagctgggattataggcacccgctaccacacctggctaatttttgtatttttagtagagacgggggtttcaccatgttggccaggctggtctccaactcctgacctcaggtgatccacctgcctcagccttggcctctcaaagtgttgggattacaggcgtgacccactgtgccccgcacatttgtacttttgactggtcttgccaaattgcctttgagacggaaccatgtccttggtcaggtcctttctcatctctaagcgtcccctggaaagttggggagataatttctatttctcagggccattaggaagtggaaacgagatcgagtttgtcaatcgcttagttttgggagtgggcgcaaagttacggctccaccggtaaagcacagtagaagggccccaagcagtgtttgttctcttcccccatgcctctctgctgagtgccactggggattgtaggagtggtgggagagcgtggggatgattactgttgggaaatgcatggcagtggctggaagagggggtcagaagcacagacctgcatttacactcacactctgggatgagggactttcctcctcagggcgtctgtctccctgccatgggaggcagtgcatgtgtcagccatggccctcggctgtaagcccagaaacagacccctgcagaatttgtagcaagggaatgtgtggggaggatgtcaccaggcaggaggacagctgggccctcgcatgggcgggattgaggccactggattccctaggtagggagctccccaaatacaggaagaaggttagaggcaggaagagccttttctacccaggaaacctgaccagtgccacgcagtgaatatacagggtcctcacgcaaggacctgagagatgtgtgggcagctgtgtgcagtgtatacagggagtccaggggctggtgtgagccctgctcttgaggggcctctggatgcccgcggtggggtgctggggcctccacgggcgtcattctgtggttgctccaggattggacttagaaatctgggtttgactacatatcaggctgccctggggcccctttcagtaaagatactcccctgagaaatacctgcccttgggaagcccactgcattgggcttacatgactgatcagactctgattctgtgtggagcagcctggggaagggcttggaggcgggagtgaggatggtctccacgtgggcagtgtagacgtgtggttttgcagggatagagacgtgcagcagcacatccgcagaggtagcgaggccttgggggtgtggggttcccacagaaagctctgtgggtactcttctgcctcctcctccctatttcaggccccaggaggccttgtgtggttctgtccctcccctgccccccaactgaggccgtggcattgtgggagcagaggacggaactggacacctagtgaaggtgcgtagaaggcatttgccccaggctggctctgggctgagcacacccattggtgacctcatcacgtgcacaccttcgctgcctgagtgcagggcacccaaaagcctgccatagacaagaagggaccttccctgagttcacccagctggccctgtctgagttggggactcacacctgtgctgactccagagacccaccccagccccaccttcctgttccttcagtcaacacatatttattgagcacttactgtgtgcccagtaaagacccttctggggatatttcagtgaacaaaaggggtaagagttctcccctcattatagcataaatgcacagatcagtacgcttcctgctgggtcatgagaagtgccacctagagaaggaagcagggattcatagtgataaaggggctgactttttggagggtggccagggaaggcctttgaggaggtgacttgggagtgaagacctgcaggcagggagggaaggagccgttggggtgtgaggaagaggggtgctctgggcagggggtaacaggtgcaaagaccctgaggcactgtgtccagatggctctgccactggcaaggatcaggacctcaatgactgtagcagcccctccccagcacccccaagtgaggtctggccatgcagctctcccatgtgcatgctttgcctcccgtgctccataagcaggaccttgacccctccagcctccttgctgacccctctcgtctcacactccaggtcccgatctgtgcagctcactgccagatgcatcaggcagcctcctgcacctgcactttcttcacaaagttccctctgccagagacgccttttgcatctttgtcatctctgagacttttccagatgcctcccgctgcagctgatcccagcctggccatcctccccgcctccatgtcccctccctccctccctccatcatagccttgatgctgttctgccactgcccctggatttgtctcactgattgtgcagaaggctctgggacagagctggcttgtgggggattgggccactgcctattggaggcatttgggggctgtcccaggggtgagtgcaccccaggctggaccaggtgcccacacctctcccgcccagcactggcacctgtgaagggcctctggaggctgggtcttcctgcaggcaccaggaagaaacctacgagcgcatccttgctgagggcaggacccgctctccacatcctggaaacccaacagagaaagacagtctctctggcagcctccctgtcttgaagttcgagaaggctgcatttctaggctcccacaacctgtctgtccggtttgaagccggggcctgagggcttcagggtactgatgcaggacagacagctctggttcaaacctccctctgtccgctcccacaggtgtggcctcagaagaccattccctctgtagcgtggtagaggctggaaattctactctgcaggattatgatgcggattaaatgcagtaatcgagtgtttggcagagtgcctggtagggaaggggttcagtaaagagctgctcgcaccattctgtgcagggaatgctttagggcatgttttagaattttagaacgtgtttcactacatgagtagcttcttgcagctttgaggccctggcatccctctcccctgcctgcaggcttccttgttcactgggccaagtccccgcagtaatcttcctaagcatggagtagaccgggcccttcctggccagaacatccccatctaccttcagggtctactgcagtggccagatgtgagcttctcctctgtccgctcactcaccttctctgtgcctgtcttggccccttctctgtgcctggctggccccatgtggagcaatgttggggtaacagtgtggaccacagaccaccccatgctgtcttcctaggactcatagtccagtgggggagacacacaggtctccagatggtgacaactcagaggggacagggctgagacggggagcccagagggtggggcctgacctaccgtggggatcagggagggcttcctggagaaggcatccctaagctgagaattgaagaagtagtaagcagtgagagcatgtaccgtgtaatgtgtaaaggggagggagaatgtgaggtgctgggaagcaccgggcccttcgggggacgggaagaatttgggtgtggccagagcacagtgccccatgagtggagaggtccagattgtctatttttcttttcttttttttcccccaatgatcctagaaattctcccaagagaggtccagattttttgacaaggctgaagggcggcccctgagacctgactctacctgtctgcctggcctttcctcagtccagtgcgtgcacggccccctcctcgctctcacgcatcatctgtgtgctccttccctgccagacaagaacccctggagggcagggaccagttcagagccatccctgtctccccagtgccagcacagagcttggcctgagtaggttttggggactgggcttggtggctcacacctgtaatcccaacattttgggaggctggggcaggaggatcacctgagcccaggagttcaagaccaacctgtacaacatactgagacccggtctctacataaaaaaagaaaaaaaaaaaaaactggccaagcatggtagggtgtgcctgtagtctcagctacttgggaggttgaggtgggagggtcacttgagcccaggagtgcaaggctgcagtgagctatgattgagccgctgaactccagcctgggtgacagatggggaccccccaaaaaataggttttgggaaatgtttaccagatgagaggcaagacggaattctcctaaattcgaagcttggaattctcctaaattcgaagcctgaggcagaatggttgaagcaaaaagaggagatttgttgtcttatgggtctgaagggtcctgaatagtgtggtgtcaggcacagtatctctttatcaaacaatatctctttaatctctgagcttggccgggcacagtggctcacgtctgtaatcccagcactttgggaggccgaggcgggcggatcattaggtcaagagctggagaccatcctggccaacatggtgaaaccccgtctctactaaaaatacaaaaattagccgggtgtggtggcgcgtgcctgtagtcccagctactcaggaggctgaggcaggagaattgcttgaacctgggaggcagaggttgcagtgagccaagatcacaccactgcactccagcctggcgacagcgagactccatctaaaaaataaaatatctgagcttggctttcctctgagctggcttcattcgcggaaggctgttccctcctgatgggtgcagggatggctgccagtagctctagaaatgggatgcagtcttaaccaccctagtgggaagagagctcctctttcctgagagttccatctcagggcgtaggaccggctgtggctggctctgtaaccttcctgtccctgaccgatcattgtaacagaggttgtgggacggggcacctatccactcctagaacctttggggaggacagcggggagtcaaggtaaagtgaagaggcctatccaggctcctggggtgagagagattgggtgaccaaggctggtccacccaggggaagacaggaagagaagtgggccattctggcctcagacctcttcgtcctttcccagaccccacgccaaggcagagctccctgtgggatgagtttctcacttgacctgaaatctctacttgtggggctgctgcaagtgcacaggcttcaggaaaggtggaccacaccccctgtgccccaggctccttcccgagggtgtgcagcccaccatccagataggggtggatggtgcccaagtcgtgggggctgacaagcatggagagtcctgcagagaggcccagcaccggattcccaggctgctccttgagacgctgtcccacatgggccggtcactcacctgccatgagactcccaactgggaccttccctgcagagcctgtgaggtggaacgatggtgatggtgcccccttgtggggtaggtgcatgtggcaggcacagagtggtggcagcaactgtaacatacggttctggagggcagggacaggggcccttcctgtgtgccttgtggtgctgagtgccaggctgggtgagctcaccaagccctccctgggaaggtgctgttgatgcagcagggaggcccagggcagtcactgctctgtgctgttggcgacggagcagggattggaacccaggcgcctggcttcgaggcccgcatgctgtggggaaatggggctctgccatgttggtggttatttattgtcgtgaacaagagctcaggcctggtttccaggtgtgactttattgcaccctcgccctacctccccggcttgagaattctggaaaataccacaataagtgtttcttttctcttttgagattatgtaaataatacttgcctccatgctcttaaaagaaaatgacatctctatttccatgtgttgcggtgtttcctggtttgggaccccaccagctatccagtcacccaggcttgaagccaggttcttcccagcttctctctccaccctgcccatccctgtgcatgtagcagtgaccaggtcctatcgattatctgattatctgccggaagcctcaggaatgggagccttctgagtcagcacatcaccaggagcacggcctgtggccaggctgctcaggggctggtgatgttggtttctttcaccttaatgtgtgagttgtgtagtaatacggtcctatatcacttaatgatgacacattctgagaactgcgtcgttaggtgatttcatggtcatgtgaacatcctagtggacttacacaaacctaggcctggtcaggcctggtggctcacacctgtaatcccagcactgtgggagttctagatgggcggatcacctgaggtcaggagtttgagaccagcctgaccaacctggtgaaaccccatctctattaaaaatacaaaattagcctggcgtggtggcgtgtgcctgtaatctcagctactcggaaggctgaggcaggaggagaatcgtttgaacctgggaggtggaggttgcagtaagctgagatcatgctattacactccagcctgggcaagaagagtaaaactccatctcaaaaaaaaaaaaaaaaaaaaaaaaccctaggtggcatgcctactgcacacctgggctacctggaatagtctagtgctcttgggctccacacctgcacagcatgtggctgtgctgagtaccctcggcaagtgtaacacagtggtaggtatttgtgtatatgaacgtagacaagggacagtaaaaatatagtgggaaatcttatgggaccaccggctgcatatgcagtccatcattgactgaaatggctttatgcggcttatgactagacctgtatgtgcctcagtattcaaaagatgtaaaaaggtggacagagattcaacataaagaaatgatcaatgtttgggccgggcgcggtggctcacgcttgtaatcccagcactgtgggaggccgaggtgggtggatcatgaggtcaggagatagagaccatcctgactaacacagtgaaaccctgtctctactaaaaatacaaaaattagccaggtgtggtggcacatgcctgtagttccatctactagggaggctgaggcaggagaatcccttgaacccgggaggcagaggttgcagtgagccgagatcgtgccactacactccagcctgggcaacagagcgagactccatctcaaaaaaaaaaaaaaaaaaagataaatgtttgaggtgatatgctaattaccctgactcaatccttgtatgcatttatcgaaataccacatgtaccccataaatatgtataataattatgtattaataaaattaaacattttaaaaaatgtatatagagagaaggaagtttctctctccctgtcctcctttggctttgccagctcaccttcctaaaagcagtcacctagtttattgtatgtccttctggaaggatctctgatggagcttagctaatgacaatccacagcagccacagcccaggccagccgacagagtttgtaaataaagttttatttgcacatgtccaggctcatttgtttatatactatctattactcttttcatgctacaaggcagagttgagtagttgctgcagagcctagtctgatcatttaagcaaaatattgtgatgcctgcagctgtgtgtgtttaaagtcaaggcagggtggtagaggcagcggcagcagcaggcccagaggcagcggttgggtttgcagcgagaagacaaggttgagtcagtgtgtttgcgagagctggaatcgaagcctcttaaaatggcagatgatttggacttcgagacaagagatgcaggggcctcggcctccttcccaatgcagtgctcagcattatgtaacactggcttcgtggtgctcaaaggctggccctgtaaggtctttgagatgtctgcttggaagactggcaagcacagccgcgtcaaggtccacctggttggtattgacatctttactgggaagaaatataaaaataactgcctgtcaccttataatgtgggtgtccccagcatcaaaaggaatgactcccagttgattggcatccaggaaggtacccctcactgctccaggacagcagggaggtgcgagaggaccttcttcgtctgccagaggagaccttggcaaggagatgagcaaaagtaccgctgtggagaagggaccctgatcaccgtgctgtctgccatgacagaggaggcagctgttgcagtcaaggccatggcaaaagaactggctcccagggtgacagtggtggcagcagtgatcttctgagactgcagaggccccctcctctggccttctgtaggctggactcttcctacacaatgtatttgatgttttattttgtttttcccaccccttcaatctgtcggggagcccctgcccttcacctagctcccttggccaggaacaagcaaagccatggccttggtgaagctgccatccttttccctgctcgcactacagccctggttggggggagacggtgggcgatgcttgtggtttatttatttgagacagagtctcactctgttgcccaagctggagtgcacggggcaccatctcggcttactgcaacctccacctcttgggttaagcagttctcctgcctcagcctcccgagtagctgggattacaggcacgtgccaccatgccaggctaatttttgtatttttagtagagacagggtttcactatgttggccaggctggtcttgaactcctgacctcgtgatctgcccgtctcggcctcccaaagtgctgggattacaggtgtgagccactgagcccggccttatttatttattttaattcaatctggaatcagaaagcggtggattctggcacatggtccttgtgccctccccactcacccctggtctggtcccctgttccccatggtcctataccctaagcacgacccccacagactaaggccagccccctgccgtacctgtgcctctccccaaacccctttagatggggagggaaaaggaggagcggggaggggtcctgcccccatgggctttacccttccctgcggtctctctccccaacacatttgttaaaatcaaacctgaataaaactacaagtttaatatggaaaaaaacaataatagtcgaggcagacctgggccttttagtctgtactcttgcctctgtgagccttgactctgaaaaggggatagtaaaaggatgtctcttggggtggctggggggcttctgtggggtccaggcagcacaggacctaaccagcagggtgccaagcagggggatgcctgggctgcaggcattgactcgcctgtgtcccacaacccctcttggagctggagcactagcgggggctcagctgccaaaacccagggacaggtgaggctgtcaccatccaagatggcaatctggtgtgccattcctgactgccaacctgcacgatcaggtcccctccccgtgagtactacaggggaccccactcctgcagaatacaatcctcccatgagcctgaatccatcctgttgctgctctgcccctcgcccccagtggctccggtctcctgcagaatgagagcgaagtcctcaccagggtccacggggtcaccgtcccacatcatccccagtgctcccctcccggtgtgctttggcgccgagcctgctcccaccgtcacacttaagcctgccccagtggttgctgcctgccacggggtttgcacagggactgcgcagtgggcctcctgaatgaagacccagacctgagcccggtggggcctctgggaacactcctttcaaggccagctcaccctggctcctttctgttcattccaaaataacaaaataacacctgcattgcaaagcgtggttattctgagcctggttgccatcacagtcatatggggacctgttaaaatctgggcccctgggccctagctaggacctcctgactctggtgctctgtgaacctggctcgcagacgtcccgatttcatgtggtggacactggggcatgggaaggtcatttccagccagaggtagcatggttgttacggagcagccctaaatattcctgctccaggcttgtctggacttcctccctccccatccctcctctgagagttgacaccctcccactgtgtcccccagcccgcacagtgttgcttcctggtgttttgactcccacttggatgactgtgtctgtttcccccgccctgctccaggctggcacggatggtgtgagtcatcaccgccccctgatgcccaacctgtccttgcatctcttgggtaccattgcacctgtgtgcaaatgccagacagacatctctctgcctgtcacctgatgcccggcgtcaggtttctctctgtccctttgtgagggccacagccggcgggagtgggaggcaagctctgtttgcccttcatcctctccctggggagctggctgccacctgctgggcgagcggcagagccccatccctgcagcagcaaggccctgcccgccagctgctgcacagcagcatctctccctggagctcatgcctttcaccatcccacccagggctccccacaccctgcctccgccccagcccttcccctcctcaggccagacaagggagccgagagttgagctgtgctgtggtttcaggtcaagacagtcctggggtgtgttccagtcctgccacttccaggctccatcccttgggcaggtgtcttttcttctcccagattgcttccctgataagatggaggtctagttatgccagcatcataggggtgctgagctggccaagtgaaattgtgcatggaaagtacttaggagctgggtgaggcggctcacgcctgtaattccagcactttgggaggctgaggcaggaggattgctggagcctgggagttcaagaccagcctgggcaatatagcaagaccttgacccctttgttttttagaaagtgcttattagcactatgcattacacagagtaagtttctgataccgggaagtggctgccaccatcaccaccaccatcatcacgtttttctccatttgtgtctcctgctgactaagccacactgtgacactggtgccagctacttcatgggtgctctcacgtcccttgttgcctgcgaccccacaggtgtccctttcagggagggaaagaggttgctgtggtcatttaacacagcctcggcaggccagggatggaactcaggtcttcttattccaagccgttacctctgcagatccatccccaacacatgcctgctttgtagaaaatactcacacacccaaacacatgtgttttgaacacacctgtcctcctctctgacagccacttgaattctggtccctgcttaatgggccttcagagccttggacttgagcaaatgcatctgagccctgaccttgagacccacactcacacacgtgcccacccccacatacttgtgtgcacatggtggatttactgcatgctggaaaaacaagaggaatgtaaaagctaaggagcagttacgtattttttcttttcttttttttttaagagagtctcactctattgcccaggctggagtacagcgacacaatcacagctcactgcagcctcaaactcccaggctcaagctatcctcccatctcagcctcccaagtcactgcgaccacaggcatgtgctaatttttgtattttttgtttgttttgtagagacagggtctcactttgttgctcggctggtcttgaactcctggtttcaagtgatcctctcgcctcagcctcccgagtagctgggattacaggcacacactaccacgcctggctaatttttaaatttttggcagagatggtatcaccatgttgcctaggctggtctcgaactcctggcctcaagtgattctcttgcctcagcctcccaagtagctgggactacaggcacgcaccaccatgcccaactgattttttagttttttgtagagacaaggtctccctatgttgcccaggctggtctcgaattcctgggctcaaaggaacttcctgccttggcttcccaaagtgctgggattgcaggcatgagccactacccctggaccaagtgagcatgtatatgtgtgtgctaagcactggttccagggagggaccctactaactcactcactcgccacacgaccctgggagttagttacactcatccccattttagggataaaacagttgaggcacgggtcacattgctttgctcaagagtttgagttgggcgctaggatttgactccaggcagtctcgccccagaactcatgttctttttgtgtgtccgtgagaaggagtttcactcttgttgcccaggctggagtgcagtggtgcgatctcagctcaccacaacctccacctccacctcccgggttcaagtgattctcctgcctcagcctcctgagtagctggggttacaggcatgcgccacaacacccagctaatttttgtatttttagtagagacggggtttcaccatgttggccaggcttgtctcgaactcctggcctcagatgatctgccctcctcagcctcccaaagtgctgggattacaggcgtgagccaccgcgcccggcccagaattcacgttcttaaccatattgcaagactctatatctcaggtgggacctgtgagatgctgtgaagcccacctaaggtcactgagtgtgtgagagagacagcaaagatcccagccccatccctcagggccacagctgtgccctaaccactgcgcagcccttccctttggaacctggctctgagctccagcccaggccctacaccaaagcctttgaatgaactacagtcctgccatggctgtttggccttgcctgtggaataggggtcctgtggctatgctcccctggatcctggggacccacccctttatgagacttcagtcactctgcctggaagccgtgactgacaaagatcacctgcttcctgctgccttaaaggagacactgggcatcacatgaccttttccatgtccatcatggggtcatgtgggctgtgacatggcagagtcagatgggtccaagctggccctgtggtcagacgtggtggacccatcacctcccctcgtgagtccgcattgagtgcagatactgaggaactgggtgtgaaatgcctcgggtagcatctctcatgtggttagtgctcagtacgccagagtcagttattttgacccacgcctgctcatgaactgtttcacgctgccattttcttcttagccacctcctcacaccattttaaatggacaggtgtgtgtaggggcccatcctgggccagccagctgctctccctgcaactttggacaagttatcgcacctctgccccatgccgcagttttctcctctcttttttttttctgaaattttttttgtagagactggctttgttggcaaggctggtctcaaactcttggcctaaagcaatcctcctgtcttggcctcacatagtgctgggattgcaggcgtgagccatgtgcccagtctcctctctaaagtgggaggatactaatactcccgtgatggaagtgatcagggaattgaagctgtgtttatttgcattggaagtgctggggatgggcctggcgggtgtgagtgctgtcagcgcgaacttcctctctgatctgcccatgctgctctttcttttttcttattaatagattggtttcttttttatttgaatacatttggcctcatttctaagcaatagtatttgtaaaatcttagttttggtgtgctcattccttttttttttttttcttgagacagagtcactctgtctcccaggctggagtacagtggcacgatctcggctcactgcatccttcacttcccaggctcaactacttgagagtgcctcagcctcctgagtacgtggaactacaggaacccaccaccacgcccggctaatttttgtatttttagtagaagtgcatttctacggcgcttctgtaagcacttgggcggatgtgacctcctcggtctctgactctggtggtgactcctgcaaggccggacctggttccagaccctgtaggtgcccagctgaaggtgtggtctgattgctgtgtggggagtgaaggttgccagcctagaaactgggcctcaagctcactcagaggctcttggaacaaagaagaggcaccatcttggctgggcacggtggctcacgcctgtaatcccagcactttgggaggccgaggtgggcagatcatgcggtcaggagttcgagaccagcctgaccaacgtggtgaaaccccatctctactaaaaatgcaaaaattagccaggtgtggtggcgtgtgcctgtaattccagcaactcgggaggctgaggcaggagaatcgcttgaaccagggaggtagaggttgcagtgggctgagatcatgccactgaactccagcctgggcgacagagtgaaactctgtctcaaaaaaaaagaagaggtgccatcccaatgcatgagaccggctgccattgtgtcaggggttatggtggtatccaccctgatgccacagccagctctgggccagcctcctcgccccagcggtgcccacccccagcttgatcctggaccctggcaatggtgtgacatgagctgctgctaagcgtttgcagtgctaggcccgggccggactttctccacaaacgatttagttccgttagttcacccaccctgtaaaacagctacgcttctcttccccgtttaaagcttgaggaagctgaaatgtggagagttgagagtggctccagagctcctgagccaggggctaggacttgaaccctggcttcagccgccacagaggacagcttagggtgggcctggcctggctccctgcttcacagagtcgatgcgttcgctcctggatgaagcgcctggcacgaagtccgtgggcagcgctgctctgtgtgtcttgtgaattcttcttatgcttctgatagttcctccaattttgcatttcctttttttttttttttttttggaaatggagtttggctcttgtcacccaggctggagtgcaatggcgcgattttggctcactgtaacctctgcctcccaggttcaagtgattctcctgcctcagcctcccgagtaactgagactacaggagcgtgccaccacacccagctaatttttgtatttttagtagaggctgagtttcgccgtgttgccccggctggtcttgaaatcctgacctcaagtgatccgtccacctcagccttccaaagtgctgggattacaggcatgagccaccatgcctggcctggaatgatgatttttaaggcgaaacattaaataggattgcaaaggatgccagttggaatatcattagctaaatgctcttcctcactgaattgacatgtgaagcgataggatgtagcagcagctgtaataaggccttcagtctcagagtagtgatgggcattcagaatctgcagtaacttgatgcaatgggaaaatatctgtcgtttcttttcatgtcagtctcaaggtctgctaaacactgtttcttttctctctctcttttggcctctgttaataagaaggaaatgctaaatttcagttccattcatgaaaataaagagataagtgtctcccctcaagttcgtgggccctttgggggtcaaatggttaagaccagggcatgcatgggcttgtccatggcttggggtagctgctgcagtcctgggggctgccttcccaggcagggcaagctccggtccccactagagctccagggtcaccaagcacatgggcctttgtcagacagctccctttctgtctgcaagaggggcacctgccatcagctgatcccctgcagctcctcccaggcctccacccccaaggaggaggaagtgctcaggcagggaccaggcctgacctctggggaggctggcggctggcctctgtcggcttctttcctccagcaccgcagttcagcaacccaccgccacccagcacagtggccagagcggagtcccagggtctgatgttagactctgctctggaccagccacctggtcccagggagacaccatactttacccagacctcagcttcttcccctagaaaatggggcagtgcttgatgagaccaggggtccagagcccctggcctagcagggtggcaggaggaggagtccacacggagatattactggactgggagctctctcagggactcccactgcgtccagcagcagcggattggcagcagggcgaggggccccccccccaagaagctgccagcaagccctcttcctggcccccttccctgcccattgtggcatctccatgcccaatatctgctggcccgaagatctttctaacggccagtcctgacctctccctcttctgctcctagcctttccttcctgctccgctggtcaccctgaggtaaaatccaagctctaatagccaaaaactggaaacagtacaaattcctgtcagctggtgaatgggcaaacacaacgcagcacatcctataattactcttcagcagtataaagggactgaaactcacgctcattatgctcagtaagagaagccaaccgcagaaggccacacagtttcaattccattttaatgaaatgtccagaaaaggcaaatctgtgtagatagaaagcccagccctcccttccgcatggtggcggctgtggccctccagggaccggggctgcagctgttgggtttgggctacgtcccttcattcatgctgggagccactgcctgttagcctgggaacacccgggaccaggcctgtctcttccaactgcttctgtgtcctgcgtcaaggggccgggccctgaatagcgtacggcgatgtttagctgttgagagtgttttgggagtggggatcctgagaggcacgtggcattgtagttgagagctgagttcaaagcccggctcgcatatataccaggtgtgtgatcttgggcaaggttgtttctctgagcttggtttcctcatagggttgaagtgaggattcattctttcacccaaaaatacaaaaatacaaaaaaaaaaaaaacaaaccaaggaccaagtacagtggctcatacctgtaatcccagcactttgggaggctgaggcagaaggattgctgaagcccaggagttcgagaccagcctgggcaacatagtgacaccccatctccaccagaaataaaaatgatctgggcgtgacagtgcaagcgtttggtctctgctgctcgggaggatgcttgagcctgggaggtcaaggctgcagtgagccatgttctcaccactttacttcagcctgagcaacagagtgagaccctgtctcaaaaacaaacaaaacaccgagacagtgttggagacatggtggtgaccaagacagccccagtcctgtcctcctgggctcccgggctagtaggggaggtggctgatgtgtagaaagattgtgtgctgttcattgtgtatttgtgtgaaggtgcttggagcggaggtgaggcgtggagggcagtggtgacttggggtgggggtgcccaagggcactttacctcgggcagtggccagcggggggcctgaaagggaggacagagctcaggcagcctgttgttgggggagggctgaagagggcagtatgggcagaggccttagggcgggagtgggtggagccccatgaaggactcggggtgtggacagtcacaggcctgggtcccctgtgcctgcagcccagaatgtgaccgtggacgaggtcatcggcgcctacaagcaggcctgccagaagctgaactgcaggcagatccccaagctcctcaggcagctgcaggtatgggcgggacagggtgggtgcgtccggtgtgggtgtcaaggggggccctagggtggaaccagcccagcaggagagggcctcccactccccagccccaggtgttcatgaatacatctttgaaagcctgctgctcagctagagaatgaatcagtttcttcataaatttgaagagcacagaattctataaagtaagacattcaggtatctgtcagccccaaaagaaacgctgttccctggggaagaggcatatctacgattcttgtgagtctgaattacaaaatttatgtattctttttttttttttttttttttttttgagatggagtctcgcttttgtctcccaggctggagtacagtggcgccatttcggctcactgcaacctctgcctcctgggttcaagcgattctcctgcctcagcctcccaagtagctgggattacatgtgcacgccaccatgcccagctaattttttttgtatttttagtagagacggggtttcgccatgttggccagactggtctcaaactcctgacctcaggtgatctgcccacctcagcctcctaaaatgctgagattacaggcatgagccaccatgcccagcatattcataaaagtcagaattacagaaataacacatatcctcagatttaaaaaaataaaaatactacagatctgaaaagccaaatccacctcttatctcttgccccaaggccccctcctcgggaacccccgttgttggccactcggcatttcctggccttttctgtgcgttggcaaggtggctattgaggggtacctgctggttttccatttggtcgctctcccaccctgccggtcccccagccccctccctcggcacctctcctgtgggccccggcctggcgcctagtcagtgaagcaccgctcgttccgagggttccagggttgcctgtcctcgggctgttgtaccctcagctgtgctggaagcaaccacgctccttgtccatcagtgttcactggagttagggtaggttctctggaacattccagaagaggggcttgtcaggtcccaggaagggtggctgctcagtgtggcagctgagagggtgggtccttggaccccatcggcctggttcagaccagccctgcagcacccaccctgcaggtgatgtgtgtaagctcagagcgcgggtgctggcatctgcgggacggtgggttctgactgggtgctgggccccaggccctgccttcaccaagaagcctcctgtgcccagccttgccatcttcccaggctcatttcctgcctcacagcctttgcacagactccctcctctgctgggacatacccagagatgctgggcccactccctcactcggtcccgctggggcagagggcttcgcccaggcctgcctggctgcagtgctggctggtcctcagttgtgtgggtgcagagttctctcgctgtctaaggccctgtaccccaggttccagctggtgggtggcctctgagcctctgttcagtgccttcgcccaaaccccaccccagaaccctgcctgacctcaggcatagcagccatttggggcctcggctgcccccctgttcaagtgtcttcctgccttaaccccactctactttctcaggaattcacagacctcgggcaccgcctcgactgtctggacctgaaaggtgtgtgtctggctaggggttgagagcccttgggtcatgggcaggtcgggggctccctagagctgggtctgaggacctgcctggggttagcggcttctggagctgagctcagccagggcaggggctgggcctggtggggggtgggaggttgggggcagagggcccttccagccatgcaaaggtgcactgtcttagacatgcgcacggctgctgtctccccccaggtgagaagcttgactacaagacctgtgaggccctggaagaggtcttcaagaggctgcagttcaaggtcgtggacctggagcagacaaacctggatgaagatgtgagcggccctgccaccgcccacttggctccctgagctcccgggccccttcgaggtttgggtggggagaggacactgcaggaggagggggtcccctagacaaaggctgaggggtggcgcaagggcggggcctcttgcagggcaagagggagacatccaatatgaccagagtggatgtggagggcgcgttggggcacctatggcccaccctcataagcaaggagagccttagggagctgggctgaggggcaggcgtgtggcccccaggagccctttcaggaaccacgctggagggtccagctcctacagggtgggcttgggaagcattctgagagcagcctcccatcaaggcccaagggccctcacctcctcagccttgggagtccccaggcaccccaggtgtcgggatccaggggcaggggacctggagaactgaggcccaggctcaggaacaccaaggcctgtcctggtcactcagcacgtcagtcaaggactttggagggcaagtgacagaaaacaaaactgactacagcagagaaggaaagggtttgtccccgtggctcacggggccctgtctgtgcttgtcctcctctcccgtgtggctctctccagaccctggacccatcgtctctcggtggggcccggtgtcagggcccacgcctctcctccagggcagcccagagctgaggctgagcccccgaatctctatgcgcagggtgcctcggccctcttcgacatgatcgagtactacgagtcggccacccacctcaacatctccttcaacaagcacatcggcacccggggctggcaggcggccgcccacatgatgcgcaaggtgggcgcctctcggcttccaggaagaggcagctcaggctcccagcacggggaggcactttctcagggcatggcccgtaggctctgactgcatgagctcttgagtgtgggctgttgtggggatgctgggcctggccctcaggccaggagaacagggccgagaggtgtcctggcccccaggccccctggccccttctctccttgcgaggcatttcatgacctccaacttctcccttccgtaatgtcatccttctgtaatgtcatccccttggaggtggccatggtcgccatccccacgtcactcctgtgtgaaggctgggtggagggacgggacggggctatctggtaacctcccagccacacaggagttggagatcctggctgccaccagccctgcctcgctcacccacaggaccccaggctgagccttccctccccagccacagttacccccattgtaaaacaaggcgacatagccagacgacagctgtggcttcgttgctcattgagacatgggggcacaggtcctggggccagggagtgctggggcggtcctggggccagggagtgctggggcaggcctgagccagtgcctcacccctgtcctcttgcccctgcagacgagctgcctgcagtatctggacgcccgcaacacgcccctgctggaccactcggcgcccttcgtggcccgtgccctgcgcatccgcagcagcctggcagtgctgcacttggagaacgccagcctgtcggggcggcccctcatgctgctcggtgagccccaagcccgggagggtgagcaggatgtgcagcctgttggggggcaggggcctgcccagtcaccgtgccccctccccgtccccagccacggccctgaagatgaacatgaacctgcgggagctgtacctggcggacaacaagctcaacggcctgcaggactcggcccagctgggtaacctgctcaagttcaactgctccctgcagatcctggacctccggaacaaccacgtgctagactcgggtgggtgcagtggcccaccccacccacacccgtcacccagcacccactctgcccggccctgcgctaggtggtgctggggacacagacatggccaagaccaccccaacgctgtcctgctggggctcccaggaggaagacagacccgccctagacagtgacaacctagagtgggcaggactgggctggtggagcccagaggcggggtccgatcagtctgggggccagggagggcttccaggaggaggagacagctcagctgacagccgcaggatgaggcgaagtgaataattacaatctgaaaagaaagcagtgttgctgccataacagggtcagctagaggctgctttcagatgggagaggagggaagaccaccgtggggcggggcctctgggcttccatccggaggctgggagcagaaccagccttgtgagaagcctgggaaagggtccagaccgcgggagcagtgagtgcagtgggaggagctctggtgtttgatgctgggggttgagcagagaatggggagccgtcaaaggaggcgttcctgttgcatcctggaggggtggggtgggtcactgtgtccccaggtggcaggcccagaccccactctactgagcacctgccaagggccatggctgtcggcccctgggctcagctcggagggagacacagggctctgcccttgggagtttgtactccagtctagagagacaacgataagatgagtgaaatctccagcctgtcagatggtgggatctgcattggagggagacagtggtgactgtgggtgggagtgagctggctgtgaggtgaggtgggccagaggtggtcacatttgagcaaagatcagaagcatctggtggaggctgtcatccaggcacccaggcccaggggtcacagatgtgtgcccaggggtgccaggccgaggcagggctgcagggcaaggcctgggactgcggggcctccatggaggtcctaagcagagggggttgctcctaccctgcagtcccctccccaggaagcacccggaccccagacagggctctgactgccggcctcctccaggtctggcctacatctgcgagggcctcaaggagcagaggaaggggctggtgaccctggtgctgtggaacaaccagctcacgcacacaggcatggccttcctgggcatgacactggtgagtcaggctggcagggaagggaggcacctcggtccccgctgccacctcccactccagctctcagcacagttgcctctagctgacggctcctgtcctgcccatcctgcaggttcaagacgatttaaactcagccccacctgcttcctcattcagcttctgtgcctgttttccctgaggaggagcccttctttcattatctcctttttttttttgagaccgagtctcatcctgtcacccaggctggagtgcagtggcgccatctaggctcactgcagccactccagcccccgcctcctgggttcaagccattcttctgcctcagcctcccaagtagctgggactacaggtgcccgccaccccgcctagccaatttttttattttttatttttattttttttgagacggagcctcaatcgcccaggctggagtgcagtggctcgatctccgctcactgcaagccccacctcctgggttcacaccattgtcctgcctcagcctcccgagtagttggaactacaggcacccaccaccacacccagctaatttttttgtatttttttagtagagaggggatttcaccatgttagccaggatggtcgcaatctgaccttgtgatccaccctcctcggcctcccaaagtgctgggattacacgcgtgagccaccgcgcccggcctaatttttgtatttttagtacagacggggtttcaccatgttggccaggccggtcttgaactcctgacctcgagtgatcccccccacctcggcctccgaaagtattgggattatgagtgagtcaccgtgcctggttttcagtttttatgtggtgcttaaagcaagccactcaggtacagagactctcagggcgagcactcgtgtgctcaaaccccgggataagagttgccctccttgggggcttcagggcgctcaaggtccaggccctggccaggggcccaggctgtggggggtagggactgactgggtgcctggggagctgggagtggacgggggacctggcatttggggagacttcaggcacaggagggacttcaggccaggcctgcggcagggcaggacggcgccggtgttcacgcaggcgcgcgaaagaaaaggagcgcccgggcctggctctcttcccggcttctttcctgacttggcctcctgggtctcctccgccatcacggcctcctcctcaccctcacaccccctccctccagccgcacactcagagcctggagacgctgaacctgggccacaaccccatcgggaacgagggtgtgcggcacctcaagaacgggctcatcagcaaccgcagcgtgctgcgcctcgggctggcctccaccaagctcacgtgcgagggtagggtacggggccgggccagggtgcgggctggtgggctcagccgggcggccagccgggtgtggggcccgtggccagcccctgcggtgcccccccaggcgcggtggcggtggcggagttcatcgctgagagcccccgcctcctgagactggaccttcgggagaacgagatcaagacaggcgggctcatggcactgtcgttggccctcaaggtgaaccactcactgctgcgcctggacctcgaccgtgaacccaagaaagaggcggtgagcaggggacggtcctgcagccctggggcgggcggaaggccgggtggtggggccggcctgagagccctagccaggcgctcccgccacaggtgaagagcttcatcgagacgcagaaggcgctgctggccgagatccagaacggctgcaagcgcaacttggtgctggcgcgggagagggaggagaaggagcagccgccacagctgtcggcctccatgcctgagaccaccgccaccgagccccagcccgacgacgagcccgccgctggggtgcagaacggggcccccagccccgcacccagcccggactcagactcagactcggactcggatggggaggaagaggaggaagaggaaggggagagggacgagaccccctgtcctgccctggtgccccccacggactccctgggccctggggacaggagtcccccaggcagcccctccacacccaccgagcagcggatttccgtgtccagcccgggccggggccacaaggtgtttgtggtgacccgggtggagagcccgcccgagagggcagagccccctgcgtcccccacccctccctctcccccaccccctccctccccacccgcctcaccttccctaccaccagccggggccattgacacccgggacacagggtcctctgagcctcagccaccaccggagccgcctcggtcagggccaccactgcccaacggcctgaagcccgagttcgccctggcactgccccctgagccgcccccggggcctgaggtcaaggggggcagctgcggcctggagcacggtgagaggggccctagggcaggtgttgaggggccctgggtgctgtatgtgaccccaggcaagcccctgcctgttgtggacctcagtttccccctctttaaaatggttctcgcaggggccagcaaagtggggcttagttctcatctccaccctgcttcccttgggtcctgggagctcttcctggggtgggggggcatgtaaggtgtgctgccttgagcctgaccatctcagcggtctctgggcactctgcaggccctgagggtctggctggggccgggctggggacaggttgtatttgccccacccgcctgacgggggtgctggcccgtcctcccacacagaactgagctgctccaagaacgagaaggagctcgaggagctgcttctggaagccagtcaggaatccgggcaggagacactgtgacactttaggtgaggccaggcccggggcccacagcactcgggaggagctgagagagcctctggctctgacagtctctcccccaatctctcctccccaagttccctttttccggtcggtctgcgatgagctgaggccagagccatgagaatctgctcaccttccccccagccttcctgaggcccaggatgccaggggtgggggccattctggggcccccctccccccacagcaacactacaaggggtgcaggagctacagggagtggccctccgcgcgtgactcaagcacttctatttatgagcccagcactggaagactctgggggtgaatgggaggagggggagcaggaggaggaggaggtctccaaggacatcaggcgcctgttctggaggggccaggcttgccctgcggagggcaggcgtcctgggtggtggtgggatggtcccctgtggccccgggcacagggccgggcaggcagcctggtgccggagaggcggtgcgtgctggtggtggttgagatgcacagaacagccccagacagcgcaggccgggcagggtggggggatgggagcagaggatcagagctttctttttctcaagtgcaataaatctatcagggagctggggcgggagcagccggcactccgggaccctgctgtccaggccactggaggctgcgccctgagaggcactacagccctttgggggcgagtggcatgggtgtgggtgagggtgggcagagggctggggctactcctgtcggtgcaactctgttcacaccttttctaataaactggggctgggttcactttgcccaacgtctgcttcgtgcggatcctggaggtggttgctgggggtgggctgggtggaggccatcacagctcctggttacagagcatctgccagggcactggtcaggcattactgcgtcttcccccacagtcccgtctattctgcatccatgctctggtgtctcgtacggtcacctcccagccaggcgagtttacacccatcctttctgcagggagagacaggccccagatacctcctggcttcaggtctagggtctcaggatgctggatatggagtggctctgcccagtcgcccatcgctcaacaggaacagatcccagcctgtccctggcagccccaggtgttgtgcaggtgggagtatgccccgggcccagccagcactgcaggagcctggtgggcggcttgttcccctttgccagcaggggcctggggggccatgggggtgctgttgcggatttctgagaggtctgtttttccctttaggaaaggggggagcaggccgggcatggtggcccacacctgtaatcccagcactttgggaggctgaggtgggaggattgcttgaacccaggaatttgacaccagcctgggcaacatggtgaaaccccatctccatagaaaatacaaaaattagctgggtgtggtggcgtgtgcctgtagtcccagctactgaggaggctgagttgggaggatcgcttgaacccaggaggttgaggctgcagtgaggtgtgattgcaccactgcacttcagcctgggcaacagagtgagatcctgtctcaaaaaaaaaaaaaattactaaacgagcatttctgggccacccatccccttgtttcccgtgtgggaggctgacatggatggaggcgttgtggtgacatcacgagaaccacagtcgcaggctggagccctggtgtcattcagctcctgcacacaccagggagtcccctgcccccagccaccctggcctctgggaggaacaccttaggaagccactgctggtttgctgtttggtcccttgcagctgtaagtgtcctaactgctccccaggtcagccacggctaggactcttatttgggcgagggacttagggaagctacacagaacagccgccagcagcccgcagcactcttcccatccctgcacagccagcttgtccccagctctgctaatgtgcgatgtggccatgggtgaagggaagaaggggccccctcctggccactgtggatccagcccgtcttggtgaggggccggggcatgtgaggtgtttgcatcaaggtactgagagacctctgtccttcgcctggtttgggtcagcacagtgccccaacgatcttcagaggcccttggtcgatattagccgttgctcatggtctcagcctctgtggaggcagctgtgttggggtctcacccagcccgctggccgtctgcctccccaccccatgtgaggtatgctaggggagggacagggatcctcttcccagcctgtcccttgatttgctttcactaaattgagcttggagtgaggaactgggcctttcttactgttgggggttgaattgtgtctcccacaaaaaaagatgtttgtttatttatttattcatttatttattgagctggagtctcgctctgttgccaggctggagtgcagtggcgcaatctcggctcactgcaacctccgcctcccaggttcaagcaattctgctgcctcagcctcccgagtagctgggagtacaggcgtgcaccaccacgcccagctaatttttgtacttttagtagagacggggtttcaacatgttggccagaatggtctcaatctcttgacctcgtgatctgcccacctcggcctcccgaagtgctgggattacaggcgtaagccactgcgcctggccaaaaaaagatctttaaagtccttacctccagtaccccagaatgtgagctcacttagaaatagggtttttacaaaggtaatcaagttttaactcattttaatgaggtcactcgggtgggccctgctgcagtctgattggtgtccttattaaaaggggcatttgggcacagggagactgccacgtgaagacagaggatggggtgatgcctttgcaagccagggagtgcggagatggccagcaatgcaccaggagtggggagcaggcacagagagcccctccttcatctggaacttttagcctccagaagcgagagacgatacatttgtccttcaaaggcacgtggtctgttagactgtgttagagcagctctagaaaccacagccgttaccacaacaccccagcctgccgcgctcctgattttctgaagggtcccagatcgagggctggaggctgagaggatcccccttgccatcttgtcttccccttcccttcagccacccaagtgtcacccgagcttgtcacgttttggtagcctttgctgaagacgtagggggtctgtttcatgcaagatctcaatgtcctaacacaggagatgtttattgtcacatgtggatgttcagagtggcaggcagctcttcaccaagttattcctggacccaggcccctttgaagctcttagggctctgttgctccccagggcctcaaggatcccggatcaagtgggcagatgggggaagggagtggagaagggaaacctgctccctgactcattgctgggaaaggcgcacaggtcagccgtgctccttttttgttcgtgacaacggtcccgtggctttacacaggtgcaagttctcatagcagctccacgtgaagatacagtgaccaacagtttggccacagcttgtaccacgtaacagaggctgcggcttttttttttaatcagtcggagtcttgctctgtcgcccaggctggagtgcagtggcaccatcttggctccagccaccacctcccgggttcaagtgatcctcccacctcagcctcctgagtagctgggattacaggcatgcaccaccatgcccagctaatctttttgtatttttattagagacagggcttcaccatgttggccaggctgatgcagcttcttactgaggcatggggggcttcagtcctgccctcacctccagccaagtctacacgttagcatctctcacagcaccccactcctggtaacaggagtgaaaatttattttcagcttggattccaggtggtaagaaacaaacccaactgaaactggcttaagggaggctacagggatatattgaccccaaccacacatctacagaaacagacttaacggtgtcacgaggccccatccttctccctctgaggccagctctccctgactgctgggaaacagctcccaggaggtccaggcgtatcctaccagcttagtcagtccaggaatgggaaacagcacctctgcttgcccagccccagggaagatcatagagggctcccactgacctgcatgcacctgtgacaattgctgtggccagagaactccggtgctgcagccagacctggatgctatgcccagccttggaactaaagaactgtgaggtcagtgacccagtcccatggcctgagggtgtgtgcctttgcagagctctcaggttcctcgggggctgtcccctccaccagcctcagggccctggctcagaagccacaccctcagcctcatcccagggtatgttcagtgttggcccttgtggcccctgccggcacacacttggaactgggccaggcaccccagggcctgagcgtgtggctgaacatttgaccagtgaggaatcaggaactgcccagaggagtgacacccacccccagcccagggctctgcccagagggaaagtgggggagccctagtgtaacccctcctggctggctgtggcttgggccctgtatgtccccatctctgcccaacttccctgtcctcatcagggggctgatgcagtggcttcagtgtcagtgactaaccagtggccctggagtgactcgtaaggcaggtaccctgtggacagttatttgtctgggggaggttagtgccacccactccagctggctgaggtgccagcgaggtctaacccattacgttgagaatggagccaccctaggggtggagcagcttgctgaggtcaccgaggtcatcctcagaaatgccagcccctgccctactcacagaggggcaagctagggcatggggacaaggactgggattccctgaggcctgggcgctccatgttgcctgagtcaacctggcccatccacctgtcatctctgcagcctcacccaccacccccgcagcctctcctgccacagagatgccagatgaggaggccagcatggtgcagaggagtaagtgggcttagcaggatggggcaggccctgtggcaggacggggcaggcctggtccctggtcagatcaggatgcggagagcaactccgggctctcaacacctccatttattgcatgtataccctgacttcctcactggtccttctgtgcctgctctcatgctggcaccggcttgtggccgcactccttggaagctatgtccacggctctggctcaggttcacctgggggtgtgggcctcacagggctcattcggaccctgggttgcggccccagtccagccccctattctcccatctgggcagatggaggaacccttgcctcctgctgcccgccaagtcctccatttaaggcccacctgggctggattgccctggacggaagagcgcacaggccaccggccatagcttgcccctgtgggccaagtccccagtgtggtggccttcgccggcttgccctgaggcacggcccgacgggggcgccctggaggcgctgttggcccggtgggcagcgtggggggtatcgcgggtaggggacttgggcgggctgggcggcttgagcgcgctgacggctcggatgagacccatgcgccggcggatggagtggtccaggttgaccgtgcagcgcagcaggctctgcgcctcggccacggtgaaggggaagtcggcgcccaggaagcgctcgaagagctcggggtcgccgtccaggtcgagcacgttctgcaacgccttggtcatggtgtgcagctcgcggctgttgtcgcggaaaacgtcccagaggcgcgcgcggccctcgggcgcgcccccggtctgctgccggtcctccaggcactgcagcgcccagctcaggcggcacggccactggttggcgagcaccacccacgccaccgcctggcgcggcgtggggcccccaaagtccccctgctgctgctgctgctgcagcaggcgcacggtgatgggcacggtgttgacgatgcgccgcatggacaccacgttgtcgggcacgtactcgtagaggcagtcgcgctcgtcgtgaaggcagaagagcgcctcctggattcgccgcgccgcctcgtcgtcgatgcggccctgcccgcgctccgtccccgcctgcgcctgcaccgccagcagctgcgcgctctcgcccccggcgtcccccggcagccacggcttgcgcgtcatctcgcggtacaacaggtcgtcgcggctctgcaccgcatcgtgcaggaactgcagcttggtgcggcggcccataatgggcacagagaagggcagcgtgacagtgcggttgaggaagaggtagccgttatcggccgtgcccttcatgttgcccgcgctctctaggcacgcggccaggatgctggggtccacgaccaggatgaagatgaagggcgcgtggctgtcggacagcagcgtgttgatggcgttgagcacgcccaccacgcgctccgggtagcacgtgtccagcccggtgacctccagcaccacgcgcagcctgcgccgctggtagatctccaggaagcacaggaagtcggtgagcagctccacctccttcttcacctcgcacatgaaacccagctggctgccgaacttttcacgcgacaccagccgctcgatcttcttgcgctggcttacgaacaggtgcttgcccaccgagtacacggccatgagcagccccgagcccgacagtgtggtggccgcgccgccaaacaccttgagcaggctgccgctcgggctgccgtggcccagcgcgtggccgcccagtgacaagtagagcagccccacacccaggcccagcgccgccagcagcgccagcagccccaggcacacgcggcgccgacaatgccactcgctctggcagcagtcctgcctggtggccggcttgttgcccagcaccgagtacacgctgaagggcagtgcgccatagtggcggcggatgccctcgcacaacgtggtcaccaggccggcccacagcttgtcggtgcccgcgtactgccaggcgctaaagcggatgaaaaggaactgcacgttcctgcgccgcaggtgcacctcggtgatgatgggctgcaggaacaccaggtaccacagtagctgcgggacgccccagccgctcacggcacgcggccgccactgcacgtgctgcagctcctcgctctcgcgctgcgcggcctcctgctgcatcagcgctgcgggaagggagcccgggagccgcgtgagccgcagacccgccggggtgggcggggcctagtacgggcagggcggagcgctcctggagaggcgaggggcgcccagcagaggcgaggggctggaagcgagccgcggccgctccttaaagagctggaagccggtgcagaagcgggggcgtggagaggcctggagccgggcttggaccggaagcggtctgaaggccaggctgtggggtcgggatgggcagaggtagagccggcagaggagagatgggaggaggcaaaaagagatacgaggaagagccagggatgggcaagaggctggaggcggagcgagggtgtggagggcaccgggaaggttctgagagtggggcaggggacaagtggtcggtgtaagggatgaatgaatgagatgctgaggaggagctatgctaggcagcaggatacaccctcggtcttatcttgttgacttaactgctcctcctgcaggaagccctccctgatccccaggctgggtcgggggccctcagccattcctactctgggtcatcactgtctgaggacaagtctctctcccctgctggactgtgagccggaagggcagggtcctgcttgtcttggtcaccgtgtcccctgggcaccagaaggtgcttagggaatgcctgaacaatagatcatgagaaatctgaggtcacagagtgaatgagcgggagtgtctacagcacccagcaggaggagtagggactctctgttctttatatcctcttctcctcccgggaccctgtgacaacacaggacaggacagtgagtgctcaatggacagtcagtacaggaaggaaaggctattgggcctgcaccagggctgggcacacgtaggaggaacgtcagtcccagcccctctggccccacgtggggctgaggtctgagctccagcagggcttgatccagatcaaagctgctggggaggccagtcgcggtgagtcacgcctgtaatctcagcactttttgggaggccgaggtgggcggatcacatgaggtcaggagttcaagaccagcctggccaacacggtgaaaccccatcgctactaaaaatacaaaaattagccgggcttggtggtgggcacctgtagtcccagctacttgggaggctgaggcaggagaatcgcttgaacctgggaggtggaggctgcactgagttgagactgcgccactgcagtacagcctgggcgacagagtgagactccatttaaaaaaaaaaaaaaaaaaaaggccaggtgcagtggctcatgtgtaatcccagcactttgggaggctgaggcggatcacatgaggtcaagagatcgagaccatctggccaacatggtaaaaccccgtctactaaaaatacaaaaaattagctgggcgtggtggtgagcgcctgtaatcccagctacttgggaggctgaggcaggagagtcacttgaacccgggaggcggaggttgcagtgagccaagatcgcaccattgcactccagcctggagacagagcaagattccgtctcaaaaaaaaaaagctgctggggaacctggcgggttgcagttcatgtcttcagttggcatctatgtatcaggtactttgtgaccaccaagccttaagaggtgggtctgggtggcacagaggccagtaggggcttggcaggagcctgcagcctcaataaagagcctgggctttctgcctcaggtgctggggagcatggaaggcaccaagcacaggagggacagggtcagatctgtccttcagaaagagtccttggagtggatttggtggcagaagcagggaagggtaaaacttgggggcagccaggaggccagagaagcagagcccggggtagaggcatgggcttggggagggcctgggctggggcaggctggccacaggggtggggggatctgggggaagcctggagctgggcggggaccagaggccctgtttctcatcctccccccaacaaacacacacagctcctcacccgtgatcttgtccagcatcatgtgcaggcggcagccgaaaggggcatagaaacccacggtcacagggaccggcacgtggcagagtgtcttggccaggcagctgcagtagacgtcatcctctgtcaggatgtctggtggttgggagtggggacactgagtcaggaccactggccaggcaccaccctcctcccatctgccctccatggcccccactatcagccccttcctggcaccctgtgcaaaggggactcaggtcaaaccctgcagtggaggtttctgtggccatcagtggccctcacctccagggcgagctgtgcccctttgggtcccaccaggctgaggctgggaggctggaatccccccagccacacaccagaggctgaggctgcgggaagtcagctttcctggccctaggtcaccaggcttgcttggtcactagcccgtgattcccccggggaaaatcccaaaggcctttatttgggatacgaggccctcagatgccaagacaccactttccaccatcagcaggactccaggccactcctgcctgctctgctggcccggccagagcatggagaggccctgggccgcaggctcctcccaccgtcctgtccatcatgctggcaagtcactaatcccacctgagcccagggttgggagagagatgaccagactggagctccagtcccagccccaccgcctttgtctgcagaccccagggagagccacctctgagaggctcatttccctctgaagagtggggcagcagagacaccagggagcaggaatgccaaagggtctggccagcgccgggcccttggtcaatgtcatggtctccagtggccatttagggccctggggaccaggcactggcactacggcatccactctgcagagggcaccctgtcccccagtgagggttgcttcttggacctggaaatggggtatcaaaaaggtagggttcagtcttggggggacacatggggccagctttgtggtgcacagtgggggtaacacagccactttcagagaggcctggtgggctgtaggaaacgggccacacctggcggcagagccaggaggccaggaagcagactcaggagtagttctactgaggtgtgggtaggcgggtctaattccagctctgccagatcactgggtggccccacctcatccaccctctacttccctgtgtgtgaaatagacatcgtagccctgaggctccggtgacagggctgtgcccgacctaaagtccctgttgctctactttcaatccagacctggaaacccagccgtctccacctctgctgccgccaccccggcaaggctgccgcacctctcgcctggatttttgcaatctcctgctccctcggccacctgcttccgtcctcctcccatagcccattctcctggagatcctgtcagctcacatccatcctcggctcctgcctcctttgggcaaaagccgaagtactggctccttgctggcccgggaacatgcctcctcagggtctctgctcaaacgctgccttaatgaggcccagcctgacaacccgatttaaatctgcaaaccctgacatcccccatctcctgtccctgctttatttttacctagtgtggttgttaccgagtggcatacttttcgaggcaaggtcttgctctgtcacccaggctggagtgcagcggcacaattataagtcactgcagcctcgaactctggggctcaagggatcctccttcttcagcctcccatgtggctgggaccacaggcgtgcatcactatgctgggctaattttttattttatcttttgtagatacagggcataactatgctgcccaggctggtctggaactcctggcctcaagcgatcctcctgcctcagccttccaaactactgggattacaggcatgagccagtgcgcccagacatactttttttttttttttttttttttgagacagagtcttgctctgtcacccaggctggagtgcagtggtgtcatctcggctcattgcaacctctacctcccggtttcaagtgattctcgtgcctcagcctcctgagtaactgggattacacgcgccagccaccacacctggctaatgtttgtacttttagtagagatagggttgtaccatgttggccaggctggtctcaaacccctgacctcaggtgatccaccagcttcagcctcccaaagtgctgggattacaggcatgagccactgcacctggcctcccagccacttttaaatttccatgtttcctgtacctgcccccggctgcaatgcaatgtgagccccatgaagacaagagatgtctgttgatcccactccccactgtgcccctagaacagggtctggcacgctcagggtgctggatacctagtcatggagtgaatgagggagggagagagcaagcaagtgggtcttcccattgctgacctttgctctccgttccccaggctactccctagctctgtcttccccaacgccagagccagccaacaacccagggctcaccatccctgccccatgtaccctgtaccctgctgagccagaggagggagctgagaagagaccagagcagagccagggtgtcggcagagggaaagggggaaggagagggaggccttcactgcctggcgcaggatggaggcacggggcaggcctggcctggaagccttggaccccaacaggcaaagctgaggcagccagcctgagccccatggccagggacgcacccctcctagatagggaacagggtgtggatgaagagggcaggtgcaagatgctaggcagggagcaaggagagcaggtgggaagtgaggcggcaggagtggggacagggcccccaagaaggccagggtgagcaccggagctgtaggcagtgaaggagccacaggccgctggggcgggcaggggccgggcatcagtgggctcgctgggcttcaggaggacgccagccgcggagggtagagctgggccactcctggccatggctggtgccgtggtgggtaaggtgggcgcctgaggggcgctggcaggttccttggggacagtggaggttgcaggcagccccttctgggcttcgtgaatggggcagagccgctgccgcagggggctgggaggtgagggctgggactggggctgccgctgctgctgcaggacggagggcaggaggccccggcgccagccactgccacccacttggtggctgtggtaggccagctgccagtgtgattggggggaaggccgacagggcccatgggctcggagggccgctgagtcctggcgccactgatgacagcatcctggaaggaaggaagtgggggtgactgggcctgtgtccccgacccccgggggcaccggcacaagccagaccaagtcttcaggtagaacctgggggccagagtattcttgggagccccagaaacccctcaaaaagtaagattatgtgcgggggaggtatgggcaggggagggacccagggtctgtgctgtcccatggcgggggagcagggaaggtgcaggcttggacttcagctgggggcagagagaggacgcctgaggttggggcttcaatggaggctggtgcctgccacagcagattcctggatccctggggggtgccgccagtgcaggggtcagggaaactgagaagatccattgggagctggccctggctggcccagggaggccggagtgatgggtggtggcgtggagaggggtaggccagggatttgggtggggggtggaccttgtccccagctcgggccagggtggcaggaagggtggtgacctgggaagctccagccctcgccctagccctgaggaggctgaatcagccccagtgggagggcactgccccctccccaccctgaacaagatcacctgtggtcaccaccagaaactgggcccagcctcatccagacatgttcagtgggggggctccctctcctacccctcactcccagcacactgctcccctccaggctggaggccatccacacaggcctcagggtttggaaacggggcagggcaggccaggcggcccctgcttccaactccagcccaggctcctatctttgggcccgcaggccctgtggtccgggtcctgggtcccaggccctgctgctacacagatgcctctgggtggagtgcaagtggcttttctctcctggggatgacagctccccttctgttcctccattcactctggcttcctcacaggcctctgtcggccatcacccgcccccaaactgaacccgtaccttttcggtgccccaactctgggtcccagaagtagtgcccgttggggctctgggcatccttggcgaagtggactttgtaatgtttgtgcatggcagccgggcagctgggtgctgggggcctgctcctgaggcaggagggagcacacaggcttggcgtagcctctggggcacgaacagcagagagctgaggtcagggtccctgccctgcccgacagcttggacaggggaaaggccaagtcccagatgctgggttcctaggtcacttgggagaagggggtagaggtggccttcagggtacagtgaggggcaggataaggagggatggccagaggagggaacggagaaccgctggggttggctaggggttaatttgaggctgggtgttgggaagctcctgggagtttccaagaggctaggacactggggagtgctgagcagacatgggctggggaaatagggggtccggtgtggtggctgagtgaccaaggggtcattaaggtgtgggcgctgtgggaggctggcacgctttggaaggacatggagctagtgaggtgagctggagagcagatgagaagcagggtgagtgaaaatcagagctgggtacctgtgggcattgaatgatacggtggagggggaattgtgagggagcaatgaaatcgcggtggtccaatttggggagaggctcagcaaactcgggcaagatgggtgtaccgcgtttccaatgtgaagagccgaaagcaggacagggaaggatgctgtgtgggggacagggatagggaaaggctgaggggcagaggaaactggggtgctgagagttggtagcctgcccaccactccccacccccagtcccagtcccactcgtacctgacggtggcctcacggccccagctgcctgccccacgagcagctgccacaccagcccggactgtcagcgcaggcccatccagatggaggcctcagcccagtgcccgcctgaccggtttgcctgcctgtccccgccccttccccagcgcctgcctgtcccagtgctctctgctctcgaggactgggactccgactggactcagtcttgtgtccccatccctggtaaggaacggagatgcatcccgcagcactgcctcaatctccttaaggcagccacaggcccaggcacttctgctggtgtgggggggacagggagctgggatgccagctcctccgtggcccaggtatgtgaccttgggcaggtgacttcactctccgagccatggcttcctcattgctgagtgggcacctgcctctcgtggctgtcgcgagggaggcactgggtgggagtcccctcagctcagggcctggcgcacctgacccggggctgtgctgacccatttacctggcgctgttctaaatggatgtccataggacaagggcaacagcacacacatcaaggcttgctacaccatagccccgtcttcctctccaccacccagggggccaggtgtgatgcccgcttcacagatgaggacactgaggcccagagaagtgaagtcctcggccccagggcacacagaggcagggcggggatttggaagcagtcagtggttgctactcccaggctcgccaaggctctgtctcctgccctcggggccagcactcagtgactgcctccccacagatgccctctgaggggtgagggccggggtaaggctgggcaggagatgccctgaaggcccctcggctctctggggccccggctccctgtggctgctggcgtaacggggtcaacagttgcttccctgacagacggggtgctccgatggggatgggggaggcagccccagaacagtgcccaggacaagataaagggaacccacccagccctgagttctgcccaggtgaccaaacactgctccctacggccagagccagggcccttcctgcgacctgggaccccgtctcctcccccacccttcaagccggttgctctgggaaggttcctccctggcccaccagggaggcggggctggcatctgagcgtgggcatctgcagtgggcctccgtgccaaccccccacacccccggcccgatcatgaagcgtggcccaatgtaaatgagccgtctccgcaggacgagattgccccgggctgggagcacagtggccaggaggctgctggacactagggggagcaggcgtttggggagtgggccaggcgggcagcactgcagaggcagacacaggacacagctacactcagccaggtggaataggaaggggtgacccaggcagggcctgacggggtgactggaccccactctacaggggaggttctttagcaaggggcccctttctcatcccatttggggttcacccccagccttggtgggcagctctgagcctggggcacttacccatgtcaggcagcgggcggcgaagcccaggagtccccagatgctacagatgcgagcggggtgggagggggcagcataagggccactctgcccagggacgggcagcaggagtgcgtaggggccgcgtgtgtccatgggggtgtctggcctccccctaccccatgcatccccagccctggcagccccagcccgacctggcctacactccgggcactcccagccctgctccccaggaagacgctccgttctgtgcacatcgccgggcagagggcagccccagacttgttgacttggcagaggtgccagtaaggccgcccatgccggaggccagcatccctctgccaggagcacggggagggagggagtggagggggacgtggcaggggagggaaggtctgaggggcatgggagccagagagggtacccactcccctgcaggacctgtgacagtcggtccacagatcctcccccactgctctgagtcagattccacacacacagcctttattgagcagctactgggcagtgacgctgccgaggcgggaatcccaccacagtcctgaccgcagctgggacccctttgcctcctctgacacccccacctcaatttgatacccacttcctgagcaaatgtgacccctagggcctgggattcccaagaccaccccgaaatgcagcggccccaccgtctcctgaggccggtgaggccaggggcagcagtgcggctcagcaggtgcgaggcaggcttaggatttcggaatcaccacctggaacttacctggaagagaaggcctggcttaggcttgaggatgggatgggggaggcagagggcacctggacggctcttaggcgctcacccccgtcctgcactgacaccccagtggctaggttgggctgtttcctcccgcccacggggccgcatccctgagctgtgtgagtaaccaggagcatgagggccacggatgtggccccagggaagcgcccggcacgggcttctgtggtatgcattgctcggtcctaccccacgggggccccgggggcccccatgagtgggcctggggaaccggcagaggcaaaataactgaaggtgggggaggtggtggggcaggctgtccccaggcaggaatggggctccagcttgtctgacagaggacacccagtcaggcaggctgcaagttccctggagcctgccgtcgcccccatcgaaggatcagtgaggataacttctattgcgtccacctcggctcccatgctgggaaacgatgttcaaaaccgccagacagttctctctgcagggctggcgacgtcacggagccaggggcacagatgggcctgcaccagccgtgtggctgagcaggtgacttaaaactgggcctgcctcccaggcacacacacaggagtggggctggaactctgaagcccccagcaactcaagggatgagaagaatccccccaccccccatgactcacagacgggcagggctgccacggaggcggtgaccacgctctcaatgcccagggtatagagggcgccgcgcaggaggccgcaggtgaaggccaggaactgaggagggaacacagaccagcatgggaagagaggggaggccagcacccgaggtctggggcaccccttaggcctggggaaaggcctgatgtgggatggggctgggtaaacaggaggaagggaggtgtggacaaggccccagctccccccataccttgggtgcttcctccagatactgcaggccagaggccatcgggaggaggagggggaagctgttgtcttgcaggacgtaggtcccctgggggagaggagaggctggtgggtggggtcggggcctgtacatttgaagcgcagggagggtaagcaggaacccaggtcttagattgggctgaggttgggaaggcccccttcctgagaaccactggagtcacagccttggcctccagtgctctggtagggcccagggcttccaaacttggagtgggtgcctgtgccctggggagtgtgggtcctgccctcgcctcccagggttgtgcagaaaagctggggacccggcccaggaagatgcagaagggcaggtacagcctgggtgtcactgggggactagaccagcttgggacaagcagcatcacactgggggtagggcaggcagccaccaggggctttctgcccatgcatggctcactcctggtaggctggagaagttccggaaacaccccctatgccccagcgcagcctcctggcttcccttagaggatcagacagagcaagagctgcggccgcctgtgggaaagctctgggcgggtcccggcagccgctgctctggcgccgggggattcccctcccactctcttggtcttgccctcaggaggaagctggacgggcaggccggggtgctcccacctggtgattggtgcgcaggctgtccatctgcttctggaacaccgccacccacaggtctttgcacaagaacttgaggacatccagctcctccctgaaggccagcgtctcccggggcagcctggtggggcagtaccaagctgaggccgtggggccaggccaggaagagggaggaagacaggcccgactcctgcatggagcaatgcaaccctccccgcccggggcctgcccagccctgccagccaggctgggggagagcaggaggggccgcgctcacctctcgcctagagcctggcccacacggaaccccataccctccaggaccgacaggctcatcttctgtccctagaaggccaggggagagatgctcaggggcccttagccaccacgaacccggggccacccagggggggacctgccaggggacccaaagaccaacttgctggtgctcgtcagttcaggggtgagcagggaggggctctggcacagcccggccagggcaggggcaggcctctagggtgctggggctccctcacccacctctgcagaccttgcaggctctctggatccccagatcatcagcccccaagaaccagctcccccttccctcaggaacaatgggggtcttccccaggctcccttcctcctccatgacttttcctgataacccccatgacaggctgcacgtgctttcagcgcgaaccctcacaatgccctgggaagtgggcgctgcgactccaccaagatgctccaggtgacctgcccaagggctggaggctgggccacaggaaagggggctgtggaagtcaaccatgatcatcatgccttataatattggccaagatccctggggaacacgtggaagctcgggacaggcagatcttcgtttgggtgctcgaaaaggacagtggctgccatgtagtgtctggagggtaggccagggtccatacaggaggggactgtgctggcagaggcaggccccaggtaggagggctgcactcggtgtctgtccacgtgcctgtgtgtgtggagggcatggctggaggagaggagatgctcatggatttttttttttttaagagatggagtctagcttcattgcccaggctggaatgcagtggcccaatctctgactcactgcaacctccgcctcccgggttctagcaattctcctgcctcagcctccagagtagctgggactacagggatacgccaccacaccctactaattttttgtatttcattagagacagggtttcactgtgttgcccaggctggtctcgaactcctcagctcaggcaatctgcccgcctcggccttccaaagtgctgggattacaggcgtgagccaccgcgcctggcgagttttcttttttggagacagagtctcactctgttgcctaggtagagtgcagtggtgcaatgctggctcactgcaacctccgcctcccgggttcaaacaattctcctgcctcagcctcccgagtagctgggattacaggcctgtgtgccaccacacccggctaatttttgtatttttggtagagatggggtttcaccatgttggccaggctggtctcaaactcctagcctcaagtgatccgcccgccttggcctcccaaagtgctgggattacaggcaaaagccactgcacctggccatggatctttttttttttttttttcattcgggtgttttgctgcaagcagaggaagggaggaggcccagactggggggcaccagaaatcccaggacggctggggcgtgaggcgccaggtttttcagagaaagcctggcagagcagaagtgggggaacagaggcggcaggtgtgcagccctgagctgaaggaagctcaccctcccgctggctgctctcaggagcctgcagtcaccaggcctgagccctgcagccctccctctcctgcccttgacccccaccttcccttgggaatggcagctaccgcctcctccctccagggctgcaccatcagcgcagccatccgaatggggatgcgaattctctgcttggctccagccctggagcgggtctcccagcctggagagcgtgtccgaggaaggcttcttgcagcctgcgggcccagctgcctccatccctccctcaccctctcctctgccccctgaggacattcgctcagacttctgagcctttgtaccgacttccttcccttcctccctcccagcttgcgtccccagccctgcccactgcacactgtccctggatgaggacacagctctgtgaaggtggggacccaggctgaccaattcacatccggccttcagcagccaacacagagcttggcatgtgggtggtgcttaacagactggctgatgagacaacgtgcatcaacaaaggacaccgtaagtccttacctaatgctgtcaacaggctcttggaaactatggctttaagcaaaatgacatatgatgaaaccaatttcacgcaggttaattaacataaacaagagtgaagttccaatgccatatttctggtacaaacacatcaccaaacttctaaataaggatgaaaacacttgaaatattaaacactgaaataaatgtgagctatacatacgtttaagaaagattaggccgggcgcagtggctcactcctgtaattccagcactttgggaggtcggagtttcgctcttgttgcccaggctggagtgcaacggcgcgatctcagctcaccacaacctctgcctcccgggttcaagtgaatctcctgcctcagcctccccagtagctgggattacaggcatgagccaccacgcccggttaattttgtatttttagtagagacagggtttcttctcttttggccaggcgggtctcgaactcccaacctcaggtgatctgcccacctcggcctcccaaagtgctgggattacaggcgtgggccatcgcgcccagctgagtccaggagttcgagtccagcctggtcgacatggcgaaaccccttctctacaaaaaatacaaaagttagccaggtgtggtggcatgcacccgtgtcccagctacttgggaagctgaggcaggaggatcatctgagcccaggaggtcgctactgcagtgagccatgatcatgccactgtactgcagcccaggcaacagcaagaccctgtctttttttttttttttttttttttttttgagacagagtctcgccctgtcgcccaggctggagtgcagtggcgcaatctcggctcactgcaagctccgcctcccgggttcacgccattctcctgcctcagcctcctgagtagctggcactataggcacccgccaccacgcccagctaatttttttgtatttttagcagggacggggtttcaccatgttagccaggatggtcttgatctcctgacctcgtgattcacccacctcggcctcccaaagtgctgggattataggcgtgagccaccgcgcccggccctgaccctgtcttaaaaaataaataaaaaacaaaaaaccagtaagacatttactcgcttcctccagctcagggtcctgggtggccagagcccgtcctggcagggccaaaagcaggaatggaccctggacagaacgccatcccatcacagggcgcacacgggcccacactcactcacactgggcccacggagacccgggagctcacccagcggacacatcccaaggatgcacaaggaaaggagagcccagaggaacttgcaccagcacagggagaacccacaaccaccacccagacaatggtcccgggaatcattattttttcctcatcaatgtcacaacaaaatgttattccaggaccggcatactgtgtggcaggcgttttctacagccttcttgttttacctttccagcctcacagaaggctgtaattccaggtggaaacaggggctctgaggttaagaagaacccatccaaggcaccctcagcacgggactgtctttcacaccccagcaggtccagataggagggtgggtggggtgacagccatggctgttgagggcctcacggaggtgaggagcgctgggaatggcgggggggcctgagctgaggtcgcccatatctgaagccaaggtggcccttcctctgcctggccccttgccaggcctcgccctcatgggtgacaacgacacggcttcctgttgcactgtctccctctggtgtcaccatctgctttcctccagtgtcctcaggcacagcagggccggccacacagcagaggctcatggaaggggccgatgactgcaggagacgggcaggtgtgtgtgagagacagagtgggaagagacccctgcccgtgggtccttcatggcagcactaccagcggcgcaggtgcagagccaccgcctgggtccagatccgccccagcacttaccagtgtgggacctgggccaatggctgaatacctgtgcctcagtttcctcatgtaaaaaagagggtcattttgtttgtttttgagatagggtctcattctgtcacccaggctggagtgcaatggcacgatcttggctcactgcagcctctacctcctgggttcaggtgatcctcctacctctgcctcccaagtagctgggactacaggtgtgagccactgcgtccagcccaaaggaggggaatattaatggcagctacctccaggatcctcacaaggagtaagggttggtaaaggcaacctgagtacttcaaggcagttccgggagccttacttattgcattcacagcctccacatctgtcaaacaaggagacggccccagccaatgagggatgaagcccttggctggaggagaaccccaggaaggaagggggtctgttctgtgggctcctgtagccagcacctagaacagcccgggcgagagctcgctgcctggtagctgcggctcccgtgtcacctcctcccacagcgaagctcctggaggcagggcccaggctgcactctgagggaacacgtctgtgtccacagcaaagctcccagaggcagggccaggctgcactctggtggaacacgtctgtgtccccactcgctaagggctcctttatgtccctccctcattcatgccacagacatttcctagtgtcctccaggagctcacctaccttgcctggcagggttgacaggtgcccaaatgatgccaactgacaatctgggaagggctgggagactgagtgcaaggggcccgggcagtgcagtgcagagcctgccctccaggagggggccggaggtggcaggtattccaagcaaagggcatgtgccaaggcaggggtgagaggcggggaagggaaggggccctcagagtgggctgcagagggggcattttcccctgcaggcaagtgcagccaacctgagggtcaacgcaggccacgttgcctgaatgccagccacagtgggccacagactcagtccctgccctgctggagctggcgtttcacccggggaatgggcaaaggtgcaatggccggcttcactatgctcacagcgactgccaagagggaggcaggtgtgctgcgagggtgcactcccacccctaggaagcaccccgactgtgctgagcctgagggaagagggggagttcaacagcaggagtgggctgtgaaggcacaccaggcccaggtcacagccaggacggcagcccccggaggggtgagctgggggagagagtcagcagggtccttcagccaggccaggagcgtggagtctgaaggggttccagcaagttcagcttttcccttcatgaacttcacactgcctgggtttgaatctcggccccgccactcactggctctgtgaccttgggcagattagccaaccatcccgtgcctcagtttccccacatgtgccatggggctaatggcagtacctgctcacagtggtggtgtgactggcaggtggcaacagctggatacacggctgtgtgactgctggccccactgtacccagccctggacaggggccattcagatcctggctgaactgaaaagggctgtggggaatcacagcaaaagggaggggccgaggaggagcaggaggcagggaagaaagggcggaggaggaagggagaagcctccacccacctcatcacagcgagacctggtggtgtccatgcccatgtcactgcaaaagctcttcagaggttaggggtttatctttcttaaaaacagaaggggctgggcgcgggggctcttgcctgtaatcccagcactttgggaagccaaggcgggaggatcacttgaggttaggagtttgagaccagcctggccaacatggcaaaaccctgtctctactgaaaatacaaaaattagccgggcgtggtggcgcacgcctataatcccagctattcaggaggctgagccaccaggatcgcttgaacccgggaggcagaggtttcagtgagctgagatcacaccaacacattccagcctgggtgacagagcgagactcagtcacaaaacaaaacaaaacaaaacaaaacaaaacaaaacagaagggctggccagacagagactctcccattcatatgaatctgccagagcccagcccagagccggtgcatttctggggctccccacgcctgcctctgctgagtttacacacagaccggatgaaaggaaaggtggaagggaagtcttatcagtgtcggtgctaatgacatccaccacacaggaaggatcaatcagacacaaagcagagttcctggaaatgaacaaatatggtggccaaaatcaacactttttaacaagggaactgaataacagagaaacctgtaagacagataacacctcccagaagaaaaacaggagggaggaaaaaatgagagaaaagctacaggatgcttggaagagatgcaggaagtctaatattccctgtggtgcctacaggacatacagggaacgatgcaggagaagaaatcatcagagagatcacaggagaaaaatgtcctgagctaaaggaagattcacacgtccagactgaagccaaggggttgagctccaaggaggatgaacggaaaaagcaaaccaaagcccctttagacacttgggagctcctggtctcagacaatgggtgacagcgccttagctctttactacatgcactcaggggaatcctctctttgcccaaaggcttcccttgtcttcaaagcctctgaggtagaaaagccacggctgcttcctccaagggcttctcctccttagagaacaaaggccttcctggcccctctggccggtcctccagttcacaacctgtgacagcccaggagaatggccacaaataaccaccgtaccaggcaggataggaggtcacaaaagccctacacactggctgtggctcctgggcacctgtgctgtggggacagagatgaaggagccaccatccctgtcctcaaggagctctgaagctggtgggaaaggcggcctgtgctacccagaagccctggggccagaagcctgagttctaattttgcctttaagagaacattctgccctgaactgggagggaggcgggtgggggccatgtgctccaccccttcctgtctcttgtgtctgccctacccctcgattgttctctaggcacctgctagctcctgggcagaggctgaccctgttcaacgcccacctgctgagccactctgtgccaggcccaggggtgtggtggggaacccagggaaggagcagccctggttaagaaaagcacacagacagaagtgctggcacacagatgggtgagtgaggggtgggtgcgagaagcctgcaggacttccctgctgttgccctcaactctcctccctggtccagcaaggcatcctgagcaagtccagatcctgcctctgcccactcagaactccccatcctgtcccctggcccagcccggaaggttgagcccaccacagcctctgccttaagctcctgcaacagcggggcccttcccaggccaatctccatccagtccattcctgtggccagggagacatttctagaatgtaaatctgagccaggcgcacctcagtttaaacccggctatggctcccactgccttcgggatggagccccagttcccaggagggcctcgctggagctcccagccacagatgctcaggacggtgttccgggcagggacctatctgacagccgctccgcccgccccacaccctcctcagataaggggctgcccaagtgcactctcggggtgtggtggatggaggcctggcgcagcagggctattctcggggcgcctcgggcctggtctcagacaatgggtgacagcgccttagctctttactacatgcactcaggggaatcctctctttgcccaaaggcttcccttgtcttcaaagcctctgaggtagaaaagccacggctgcttcctccaagggcttctcctccttagagaacaaaggccttcctggcccctctggccggtcctccagttcacaacctgtgacagcccaggagaatggccacaaataaccaccgtaccaggcaggataggaggtcacaaaagccctacacactggctgtggctcctgggcacctgtgctgtggggacagagatgaaggagccaccatccctgtcctcaaggagctctgaagctggtgggaaaggcggcctgcgctacccagaagccctggggccagaagcctgagttctaattttgcctttgagtcttgctgaaccacctcgaaatcccttcctctaccaagcacagggtccctcctctgtgaatcgggagggctgtcctgaggactaaatgcagtcaacactgtgcaagtactgcacagacgccctcaggaaacgggaggcctgtctggttcagaggaacccttttgggccaaagagaaggaatggagagaggaggtggggccaataaagagaaaggactgaggaagccgtttctcatgacaggccccctgaaaaacggggctccccaggaggaaggagtgaggggaaacgatgcagttctcacccctagctgcagcgagagccacctgggagctttctgaggcctgacactcaggcctcaccccaaccgggttcgtcagagtctctggtgtgggactccagcatcggaatgtagtggcagctgggtagggaacccctgcccaaggtcccaggcacattcgtgtgctctgaaaggctggtggtgagcagagctgagtaagccagtttcccacactcgcttgaccacagaaacccattaaaatccttcccagggcaaatgctgggaaatgcaagtgagagtttacagcacaggctttggaagtgggaggcctggtcgcgctcctgactctgccacttgagagcaaggaactccgtccatcaaagcctccgccgcctcatctgtaaatcggggaggaccatgccaacctctctgggtcatcagaagatcaaatgaaatcaagagtgagaagccatgagtgcacacaggaagcactcatatgaggggagggagggaagagctagcactgctcataagccaaatgaatcccagtccccacccatccccacctgccacggcacaggctctgcattcacctcctcaacacgtccacactgaggacccactacgagccaggacatccagtggtcatcaatacacacccaggcccatcccgcacaaagtacactccggctgggggagacgcatgtgaattaaaggatcatacagatacacaattcagacgcatcctggcagggcgtgctggctcacacctgtaatcccaggtgtgagtttttgggaggctgaggccagaggatcgcttgggcccaggagttcaaggtcagcctgggcaacattgtgaaaacctatctctacaaaaaatttaaaaattagcagggtatggttgtgtgcacctgtactcctagctactcaggaggctgaggtgggaggatcacttgagcccaggagtgtgaggctacagtgaactatgatcatgctactgcactccggcttgggtgacagagcaagactctctttaaaaaaaaatcagccgggcgtggtggctcacgcctgtaatcccagcactttgggaggccgaggtgggcagatcatgaggtcaggagatcgagaccatcctgcctaacacattgaaaccccgtctctactaaaaatacaaaaaaaaaaaaaattgccaggcgcggtggctcacacctgtaatcccagcactttgggaggccaaggcaggcagatcacaaggtcaggagatcgagaccatcatggctaacacagtgaaactctgtctctactaaaaatacaaaaaattagccgggcgtggtggcagtcacctgtagtcccagctactcgggaggctgaggcagaagaatggcgtgaacccgggaggcagagcttgcagtgagcccagatcgcgccactgcactccagcctgggggacagaccgagactctgtctcaaaaaaaaaaaaaaaaattagccgggtgtggtgtcgggcacctgtggttccagctactcgggaggctgaggcaggagaatggcatgaacccgggaggcggagcttgcagtgagccgagatcgcgccactgcactccagcctgggcgacagagcgagactccgtctcaaaaaaaaaaaaaaaatcaaatacatccttattgagtatgatgaagcctaccaagaaaaaagtgcgagagggagaccaggagaatgtataaaggagatccaaatttgactgggggctcagggaaggcatccctgaggaagggattgttacgctaagatctgaaggattaatagttgttagcatggtgaagatgtgacaggtggaatgggctgggagaagggagcaggctcatttcacaggagagcggaaagcactggaccagggcagaggaggggccacgtgagaaaggtatttagactgactgggcagagcctgggggagggctgcaggtgagggagacaaggcaggtgttgggactccagggtttctcgtttgaaagccaggaaggatatggagtgttgggacattattacccacccccaggctgatgcatactccctgggccatgctgtatcttcctcatagcagttacacaatgtaccagacactttactcatttacttgtctgtctcctccaatgatgacaaagctccaagagtccaaaaatttttgatggttcactgagtaatccccatgtttttttagagacagggtctcactctatcacccaggctggagtgcagtggcatgatcatagctcactgcagccttgaactcctgggcccaggcaatcctcccacctcagcctcccgagttcttggtagtataggcatgtgtcatcacgcccagctaattttaaaaatttcttggccaggcacagtggctcacacctgtaatcccagcactttggaagcccgaggcgggcagatcacgaggtcagatcaaaaccatcctggctaacatggtgaaaccccatctctactaaaaatacaaaaaaaaaaaacaaaattagccgggtgtggtggcaggcacctgtagtcccaactactcaggaggctgcggcgggagaattgcgtgaacccaggaggcggagcttgcagtgagccaagattgcgccactgcactccagcctgggcgacagagcaagactctgtctcaaaaataaataaataaataaaaataaaaatttcttttagaggtgaggtcttgctatgttgcccaggctagtcttgaacggtgggcctcaagtgatcctcccacctctgcttcctgagtacctgggattacaggtgcaagtcgccacatctggctaaatgcatttttgatttatgatgttttaaacttatgacaggtttgtatctgtatatcgagatggtaacaagcaacatcctccctggggcttctaaccctggaaggaaaccagagccaataaaaatgtcttacatggccaggtgcggtggctcacgcctgtaatcccagcactttgggaggccgaggcgggtggatcacaaggtcaggagttcgacaccagcctggccaaaatggtgaaaccccgtatctactaaaaaaaaaaaaaaattggccgggtgcagtggctcacgcctgtaatcctagcactttgggaggccaagatgggcagatcacgaggtcagaagatggagaccatcctggctaacagtgaaaacccgtctctactaaaaaaaataataataatacaaaaaattagccaggtgtggtggcgccagcagcgcttgtggtcccagctacttgggaggctgagaagtgggatgatcgcttgagcccaggaggtcgaggcagcagtgagccatgactgcatcactgcactccagccagcctgggcgaccgagcaggatgcgcgtgcgcgcacacacacacacacacacacacacacagtcccgggccagtcacggtagttcacgcctgtaatcctagcactttgggaggcccaggcgggagaatcacttgagcctaggggttcaagaccagcctaggcaacatggcaaaaccccattatctcttttttttttttcctgagacaagtctcgctctgtcgcctaggctggagtgcaatggcacaatcttggctcactgcaacctccgcctcccaggttcaagccattctcctgtctcagcctcccgagtagctgggattacaggtacccgccatcatgctcggctaatttttgtagacacggggtttcaccatggccaggctggtcttgaactcctgacctcaggtgatccgacggcctcggcctcccaaagtgctgggagctacagcgcccagccggcatatttcattttattatttgactcccctagtgaaatgtaagcttcacaaggaagggattctgtcttagaacggtgcctggaatacaacagacgctcaataagtgggtgtcgaataaataaatgtcccacgctgaggcttaggtacgttatgatactcattttacaaaagagaaaactaggacacacaaagattaagtcattgggtcgcacacctagtaagtgggggaggcgagtcctcagcacacgcccaataacagcattattatgattactagccgcttactcaggccttgagctaagtgctttaccctgaatcatcgcgctcaatttagcaataaccccgagccggcaccgtcgcgaacgccactttccaaaggaggaagccagggccagacgttgccctgcaaggccggggctgggccgggttcgaacccggacgcctgacgcgccctccgctctcccagaggcgttaccttggtggcccccgcttcctccccacggagcccggcgctcacccccgggccggggtcggggtcgtgagcccacagctcagccaccatctccgtgtgaagaaactcaaacaacacagtatccgccatgccccctcctcgcacgcctaaagatgcgcccagcgcttccagctctcattggccaggcttggtaagccacgcctcttgcgtcatggcgcgagccctcctactccggcttccattggtgttttagactagccccgcctccccgccccggactcaggtggtgtgcgcgtgagcctgggacactagggggcgggcctacgccttctctggccacatgtggcaacatcttctgctcttactgccgtcccttccctatttccgggttctcgagcattcctattggccaaattactggttacacgtgacatactcggcttttaaaatccctattggtccactccagactttcctcgtcgcacaacctggaagagccggcccagctgtttctctattggcggttcctccattcatgtgactcttctgcacgctcactcaaagctgatgctgagaacttgcttcctgattggtagccgggcgaatccacgtgacttggccgctaatgcccgcccaacccgctcccctattggttgaaatcacagcccttcagctgccacggtgagaacgcagcactcgggttaggaagcggatctcgcaagctccgagcgtcagctgccgggtacggtctttggcgttagcgcttctcccatcccatgagtgcccccagcagagtccagtcggactgtcatcctttctgcgactctggcgctggtcccgagcagctcacgggcccgtgtgcttccgggtctgagattggcatggtggaccaggtggagggtgtggcctctactaggaggcaaattcgtaaagacctcggcttgggactccgggaactcgggccccagatccttgttcgagctggtcttcagtttccccatctgtacgctgaagagcctggggtccagtaacccccatcatcacccagtttacagaagaggaaactgaggcccagacggggagcagctgacaccaagtcgttaagagaatcagcgaaggggctgggaatccaggacctgcgccttttacccaccgcggcgccggtctcacgtgcagtcccttcgctcttctcccctagttcggtgccatggcgtcccagggtcgtcggcggaggcccctgcggaggccggagacggtggtgccgggggaggcgaccgagacggattccgagcgctctgcgtcctcgtcggaggaggaggagctgtacctgggtccttcgggcccgacgcgcggccgccccacggggctgcgggtggctggggaagccgcggagaccgactcggagccggagccggagccggaaccgacggccgcgccgagggacctgcctccactcgtggtgcagcgggaatcggcggaggaggcctggggcacggaggaggccccggcgcccgcccccgcgcgctcgctcctgcaacttcggctggcggagagccaggcgcggctggaccacgacgtggcggccgccgtgagcggtgtctaccgccgtgcaggccgcgacgtggccgccctggctagtaggctggcggcagcccaggcggcggggctggcggcggcccacagcgtgcgcctggcgcgcggggacctttgtgcgctggccgagcgtctggacatcgtggctggctgccgcctgctgccggacatccgcggcgtgccagggaccgagcctgagaaagacccggggccgcgggcctagccatgattctacttcccaacctgactgcaatttgggggtaggccttgctgcctctgggacctgactctgtctcctgtgtctcttatcaccccccacccccgctcccatcttggtgtcacccatgggggctaatccggtccccttggataatgctttatattggatatagttcaacccctactgcggagaccagggccccactatccttagatctggttcctctcccgatcctgaccctgccgcctggttctgagccttcccctggggcttggctccagcctttgttacatagttgctccttaatctgtttccaccctgggggctcaccaattttttttttttttttttttttttggagacagggtgtttatctgtcacccaggctagagtgcagtggcgggattactgctcactgcaacctcgacctcctgggctcaagtgatcctcccagctcagccttcaagagtagctgggactgcagacctgcaccaccacgtccagctgcccggttaatttttttctgtcggtttgaagaggggagaaggtctcactatgttgcccaggcttgtctcaaactcccgggctcaagcaatcctcccactgtggcgtcccaaagtgctggggttacaggtgtgagccaccacacactgggctctgctctgcctttctgagtttggtttctgcttatggtggggagcttgttcccgttcttcccacaagaacccaggatgtggcacagcttccctgccgtcttccttcactcagttggctacgcctcccatcctagctccacttccagaactgccttcaccctaggctgggtccttgttttgtttttagagacagggtctcactgtgtctcccaggctggagtacagtggcgtgatctcggctcactgccacctccacctcccgagttcaagcgattctcctgcctcagcctcccgagtagctaggattacaggcatgcaccaccacgcctggctactttttatatttttagtagagatgaggtttcaccttgttggccaggctggtctcgaactcctggcctcaggtgatccacccgcctcacctcctaaaatgctgggattacaggcgtgggccactgcgcctagccagctgggtccttgttctgctgcccaagcttggccctggttccgtgtgctggttctactttttgttctcccatctgcctcctgcctcctcccctttgagcttagccccgccctctcagcctgatttctgtttcccaagtccagcagtgtcgtgggataggttttgctttcttttactgtctccatcctacttacacctccctgatcctggggtctggggactccccatggtttccttccttctgcaggcccaaaatgatggcccctcttaacccaaggcaggggatcttcctcccaactccctggaccaaggtggcatttcctgcacacccctccaggccaagatgatgctcgctctcaactctgtaggccaaggtggcgtctcctcttgactctccagacctaaagtgacacccttcaggcacttcgggcccaattcagcccagtcctggtgctttcagcgccagatgacagcactttgcagataagaacgatatgatgtgtggatttcactacatttggctcctggatgctataaaaggacttggatttctgacttggctcagggactggggttagcagtctctttctgctccttttcacctgtgttttcttccgatcccagctctggtccctcagccgcattcatatttactctcctctcccagcctgatatccctgtccctcatctcaacccgaagccaagatctgagcccccaagatggagaatggggaggagctttttatggcggactgattaaaactcttaagcatttacccttatggttagttccttttgtttccctatctaagctaagggtgagttggttgatttctctgagaatgggggtcccgagacctccatgcctggcttatggaaggtgaagctgtagttgggaaatcaggggccctagatttttgccctggttctgtatttactcgtattttattaattcaacacacacgttttgggtacctgacctgtgctgcggctaggggtatagcacccagtccctgccctcacagaggtcgcagtccagtgggagaaacagtaataagatgttctcatagatagttctagtaatcataatttatagtttaatttttaaaaatagagatgatagcctggccaacatggtgaaaccctgtagttattaaaaatacaaaaattttgggcgatgtatcacgcctgtaatcctagcactttgggaggccgaggcacgtgctagtaattccagctactcagggagctggggcatgagaatcgcttgaaccctggaggcagaggttgaagtgacccaagatcgtgccactgcactccagcccgagcgacagagcaggactctgtctcaaaaataaataggccaggcgcagttacgcatgtctttaatcccagcactttgggagatcgaggtaggcagatcacctgaggtcaggagttctagaccagcctggccaacatggtgaaactctatctccactaaaaatacattagccaggcgtggtggcacatgcctgtaatcccagctactcgggaggctgaggcaggagaatcgcttgagcccaggaggtggaggttacagtgagctgagatcatgccactgcactccatcctgggtgagagtgagactccatctcaaaaataaataaaaaataattaattttaaaaaataaaatagagacgagctctcacaatgttgcccaagttggtcttgaacttctgagctcaagggattctcctgtcttgacctcccaaagggctaggattacaggcatgagccactgcacccagccataatttataatttagatacaattttcttggcaccatgattagagccatgaagaagtaaaggagctttatgaaggtggagcgggatccacctgacctaatctgggcgggagagaggaagtgatgagtggtgctggagctgagcccggaaggtggaagtaggtgaaatgggagtagggtgaagagttgcagacagggagaacagcatatgcgagggccctgaggcagaagggaaagggaccataacctgtttaacagaagaagatgatttctgctctccacctagaatggagaagtgtggggtggttgtggggcaggggggtgctgagtgcagtaccagaaggggccagataaaggtgagctttaaaaaaattgtattattggctgtgcgcagtggctcacgcctgtaattccagcactttgggaggtcgaggcaggcagatcacctgaagtcaggagttcgagaccagcctggccaacgtggtgaaaccctgtctctactgaaaatataaaaattaggcatggtggcacatgcctgtaatcccagctactcaggaggctgaggcaggagaatcgcttgaacccgggaggcagcagttgcagtgagccaagattgcgccactgcactccagcccaggggacagagcaagactctgtctcaaaaaaaaaaaaaagtaggtgcggatcaaccagcatctcctccctcctgagcactccctccagctccccttccacacctagggcgagtggatcacaattcaaagaggatgatctcccagaacttcccttttctttttcttttcttttctttttttttttttttttttttgatatggagtctcactctgtcgttcaggctggagtgcagtggcgagatctcagctcactgcaacctccacctcccaggtttaagcaattctcctgcttcagcctcctgagtagctgggattataggcacgtgccaccatgcccagctagtttttctatttttttttctttttagtagagatgaggtttcaccatattggccaggctggtctcaaactcctgaccttgtgatctgcctgcctctgcctcccaaagtgctgggattacaggcatgagccaccacacctggtcaggacttcccttttcaatgagtttagcgagagtccctgaggagctgagctgcctgggagagtggcagcttagtggtctcatggtggacttccagccctggagcacagagcttccctcactccttaaactccagctcactagccaggcctggctttcagcccctttctttctttttccctccctccttccttccttcctttctttcggtggggtctcactattttgcacaggctggtcttgaactcctggcctcaatggatcttcccaccttggcatggcagggatgggaatctgattggagagggtacaagagggtgtggaaggagagccagagaccatcctctttgcaatgttgagtgaaggggtgggatggtaagaaatggggaagtggcagtgcatggtggcttacacctgtaatcccagcaatttgggaagccaaggtgaaagcactgattgagcccaggagtttgagaccagcctgggcaatatagcgagaccccatctctacaaaaaatacaaaaactagctgagcgtggtggtgtgcgcctgtggtcccagctactcgtgaggctgagatggaagaatcacttgagcccaggaggtcgaggctgcagtgagccatgattgtgccattgcactcgagcctgggcaacagagtgagaccttgtctcaaaataaaaaaggggccgggcgtggtggctcacgcctgtaatcccagcactttgggaggccgaggttggtggatcacgaggtcaggagatcaagaccatcctggctaacatggtgaaaccccatctgtactaaaaatacaaaaaattagctgggcacggtggcgggcacttgtggtccaagctactcgggaggctgaggcaggagaatggcgtgaacccgggaggtggagcgtgcggtgagccaagatagcgccactgcagtctggcctgggtgaaagagcgagactctgtctcaaacaaaaaaaaaaaaaaaaaaaaaaaaaaaaggaaggaagggagggagggaaggagggaccgactggggaagtacctagatggggaagatgggaggggtcatggcatgtttgtatgctgctgggagtatttcagaagagggagaagtcgtgatacaggggaaaggtgggagaaaagccagaccattgtcctgcagtaggtaagaagggaggaggagatagcccccaaggggaagggcaacactggggtaagagagactatttgtggctagttgcaagtcactgggtagtgatgaccactctggtcatcactgcctgggaactggtctgtcacccccactggactgttggccccatgaggacggggctgaggctgtcttggccagggccagctaacccagggaaaccacagagtagatactgggcaaattgtttgttgaatgaatgaatggccttcacaccatcacacggcatcagcctctcagatgcatggagctgttgagacgttcgggcacagcctccctccaaaggtgatgggcactcggtcccacataacacatcaccctcagatgtgcaggatgagagggtcagacatgcaccaaaatgctaataacacccactccacaaatatttgctaaccacatttcaaggggaaaggcattcaaggcagaaagaatagcatgtgcaaagaaccagaggcaggaaaatcctgggggtgcttgtttgggcgagatgaattgtctgttgtgcatggactgctatagaggggcctttggcaggagggagagctgaagactcagtcaagagccaggccacacagggccagaatgaggagcagggctttgtcccaagggccctggggagccaaggcaagttccaagcaggagagaggcagggacgagtttgtgctttagcaagagatacctagatgggtcaggtgcggtggctcatgcctgtaatcccaggcctttggaggccaaggcagatggatcacctgaggtcagaagttcgaaaccagcctggccaacatggtgaaacccccgtctctactgacaatacaaaaatcattctgggcgtggtggtgtgcacctgtaattccagctactcaggaggctgaggcgggagaatcacttaaacctgggaggcgaacattgcagtgagccaagattgcgccactgcactccagcctgggcaacacagcaagactctgtctcaaaataaaaaaaaagaaacctctggctactgagtggagggtgcatgggagggggtgagactgggtctgtcctggtcactctgtgtccccagcaccactagcaaagagcaggtgcacagtaaacacattttgaatgaagatatgaatgaaggaagtggcaaacacttgaattattggacttctgttgtcactgagaataaaagccaaatcgtatattattattattattattttagagatgggatctcactacgttgctcaggctggtcttgaactcctgggctcaagcaatcctcctacctcggcctcctaaagtgagccaccatgcccagcctgtaatcccagtactttgggaggctgaggcaggcagatcacctgaggtcagtagttcgaaaccagcctggccaacacggtgaaaccgtgtctctactaaaaatacaaaaattagtccagtgtggtggcacgcacctgtaatcccagctactcaggaggctgaggcagaatgatcacttgaacctgggacgtggaggttgcagtgagcagagatcatgcaactgcactccggcctgggcgatagagtgagactccgtctcaacaacaacaacaaaaaaaaagtgctagggttacaggcatgagccaccacacccagcctcaacaccacagtctttactgggacattggaggccctatgatctggtcctgggtccatctcgctgagctcatagacaactggccacttcactgagtaatactggactctgggctgtcctctaagctgccagacagagcctttgcaattttgtttttctctggcactcagctctgtatgggcagtgcctatagcaacattgtataacaggcagtcagcaggcagtcactatttgttgacttaatgaatgaatcccctgcagctccactggagaggtctgaacatcatcctcatcagtagaaacctgagctagttggagcaggaggcaaaggagatgggtggaggccaggaggaccaggctgggagaattccaggatagggactggggcaggggtcagggtcagggtcaggggctggagctgatgtccagccaagagcagaatctagaatggaactgggacagggatgggggctggggccatgggagggacagggccaggggctagggaggggacacgattgggggcgacctcggttaagggcctgactccccaacacctctctttccagagcggcttcacagcaggaccacaggagtcattgtggccaacttcgctggaggcttggagatctttggggccattaaggcagagctgcagggcctagagattgagatgctgggtatgtccccacacctgcttggggagccccgccaagctgcaggcatcgcacactgacccagggccctttgtgatcacccttcacctggccccatctggtctccttgggactgttggggtgacacagcctgttccctctcgcccagtgaacaatgtggcatgctgtatgcgcagggacgcttgaggaagctgctcgactgtgagaatgtcgccagagtgaaacagagtcctagcccacctggcacctcttcctccaactctttactgccctctgttggaaaactcgcgtaatatacaaaggtaaagtcctcacttgggtacctgtgggggattccttccaggacccccactgatgccccagaccctaatacaaaatggcctagtatgtgcacataacctatgcataccctcccgtgcactttatttttttttaattttttaattttttgtgggtacatagtagatgtatatatttatggggtacattatgagatgttttgatacaggcatgcaatatgtaacaattacaacatagaaaatggggtatccactccctcaagcatttactctatgttacaatccaattacacatttttttttgagagagagcctcactctgtcgcccaggctggagtgcagcagcgtgatctcagctcactgcaacctctgcctcctgggttcaagcaattctcctgcctcggcctcccgagtagctgggattacaagtgtatgccactatgtccgactaatttttgtatttttagtagagtcaaggtttcaccatgttggccaggctggtctcgaactcccaacctcaggtgatctgcctgcctcagcctcccagagtgctgggattataggcatgagccaccgcaactggtcaattacacccttttcgttattttttttctttttaatagagatagtctctgccatgttgaccaggcttgtacagaactcttggcctcaagcagtcccccatctcagcctcccaaagtgctgggattacaggtgtgagccacagcgcccggcttcttttagttactttaaaatgtacaactagtcacccggatgtgctgtcaaatagtagatcttattcattctttctaattattattattattattattattattattattattatttgagacagagtttcactcttgttgcccaggctggagtgcaatggtgcattcttggctcattgcaacctgtgactcccttgttcaagcaattctcctgcctcagcctcccaagtagctgggattacaggcacgcgcccccatgcctggctaattttttatatttagtagagacggggtttcaccacgttggtcagactggtctcgaactcctgacctcaggtgatccacccaccttggcctcccaaggtgctgggattacaggcatgagccaacactcccagcctattattattattactattttgaggcagagtcttgctctgttgcccaggctggggtgcagtggcgtgatctctgctcactgcaacctctgcctctgcccagctaatttttgtatttgtagtagagatggggtttcaccatgttggcctggctagtctcaaactcctgacctcaggtgatcctcccgccttgggctcccaaagtgctgggattacaggcatgagtcactgtgcccggctgttctttctaattattatttttgtacccattaaccatccatcccctcctctgccacctccccaaccccactggctaatttttatatttttaatagagataaggtttcaccatgttggccagcctcgtctcaaactcctgacctcaagtgatccacacaccttggcctcccaaagtgctgggattacaagtatgtgccactgcacccagccagagcgccattgaatgttatttgttacttctgtcttgctgcttttaggattctttctttatccttgacctttgggagtttgattattaaaggacttgaggtagtcttcttttttttttttttctttttttgagacggagtttcgctcttgttgcccaggctggagtgtaatggtgcgatctcacctcaccacaacctctacctcccaggttcaagtgattctcctgcctaagcctcccgaatagctgagattataggcatgtgccaccaagcctggcttttttttttttttttttggtattttttagtagagatggggtttctccatgttggccaggctggtctcaaactcccgatctcaggtgatccgcccgcccaaagtgttgggattacaggcgtgagccaccacgcccggcaggtagtcttctttgggttaaatctgcttggtgttctataaccttcttacatttgaataccgatatccttctgtagatttgggaagttctgtgttattattcctttagataaaccttctacctctgtctctctctacctcctctttaagtccagtaattcttagatttgtccttttgaggctattttctagattttgtaggtatgctttattcttttatcttttgtctcctctgtgtattttcaaatagcctttcttcaagttcactaattatttctttttttttctttttctaagatagagaaaggggtcttgctatgtaacctggcctcgtctcaagctcctaggctccagtgaccctcctgccttggcctcccaaagtactgggattacaggcatcagtcaccatgcccagccactaattttttcttctgcttgattaattctgctggtgagagactctgatgcattctttagtttgtcaattgaatttttcaactccagaacttctgcctgattcttttaattatttcaatctctttgtttaatttatctgatagaattctgaatttcttctgtgttatcttgaattttgttgagtttcctcaaaacagacccctccttctctctctctctctctctcccccacccatatatatagtttttgtttgtttgtttcttgttgagacaagatctggctctatcacccaggctggagtgcagtgccacagtcttggcttactgcaacctccacctcctgcgctctaaccatcctctcaccttagcctcctgagtagctgggaccacaggtgcacactaccatgcctggccaatttttgtattttttttgtagaaacggggttttgccatgttgcccaggctggtctcgaactcttgagctcaagtgatctgcccacctcagcctcccaaaatgctgggattacaggcgccagccactgcacccaaccccagaacagctaatcaattatctgtctgaaaggtcacgtatctctgtctctctatgattggtcactgatgcttttattttattttattttattttattttattttattttattttattttttgagagagagtcttgctctgtcgcccaggctggagtgcagtggcgcaatctcggctcactgcaagctctgcctcccaggttcacgccattctcctgcctcagcctcctgagtagctgggaccacaggcacccgacaccacgcccggctaattttttgtttttttagtagagacggggtttcaccatgttagtcaggatggtctcgatctcctgacctcacgatccgcccgcctcggcctcccaaagtgctgggattacaggcgtgagccaccacacccagcctagtttattttttattttatttttttattttttttgagacagagttttgctcttgttgcccaggctggagtgcaatggcacgatctcggctcaccacaacctccgcctccctggttgaagcgattctcatgcctcagcctcccgagtagctgggattacaggcatgcaccaccacgcccagctaattttgtatttttagtgagatagggtttctccatgttggtcaggctggtcttgaactcccaacctcaggtgatctgcccgcctcggcctcccaaagtgctggtattacaggcatgagccactgtgcccggccggctttatttagtttctgtggtgaggtcatgttttcctggatggttttgttacctgaggatgttcatacatttctgggcactgaagagttaggtatttattatagtcttcacagtctgggcttgtctgtactcatccttctttggaaggctttccaggtattgaaaagacttttgtgttgcgatctaagtctttagtcactgcagctgtatctgcatcagggggcaccccaagcccaggaatgccgtggcccttggagacttgtagagacactgccttggtggtcttggataagatctggaagaattctctggattatcaggcagagattcttgtcttcttccttttctcccaaacaaatggagtctctctgtgctgagctgcctggagctgggggaagggtgatacaagcactgctgtggccaccagtgctgggactgtgctgggtcagacgtgtagccagcccaacacggggtctcccccaaggcccgtggtcagcactgcctgggtaccacctatgtccactgaaggccctagggctctgtgaggagcagacggcaaatccagccaggcttgtgttcatcctttcagtgtggtgtgagccccccatcacaggtgcgcccagagatgccatctgggagccagggcctggagttggaaaccttagggactctacctggtactctgttctactgtggctgagctggcacacaagccacaagacaaaatcttccccactcttttttctgcaagcaggggagcctctccctgtggccaccactgccccaggaccatggcagctactgcttggctactgccggtgttcatttaaggaccaaggtctcttcagtcagcttgtgtgaaggctgccaggcctgggtctctcccttcagggcagtgggctcccctctggccaaaggtaggtccagaaatgacatccaagagccaaggcctggaatcagggacccccaagagccaacttggtgctctactccactgtggccgagctggtaactaagctgccagacaaaggcccctttactcttccctcccgcttccttgagcagtaggagcctctccccgtagtcaccacgtcagggaatatgctgggtcatatctgaagtcagtgtgtctctgagtctcactcaaggcccacacggagtactgcctgggtactgctgctgattattcaagggtcctttagtcagcaggtaatgaatcctgcctggactgggctatttccttcaaggcagcagtttcttttctggcccagatgtttctagaaatcgccttgaagctagagcctggaatggggccctcaggaccctgcttggtgcgctatcctacggtggctgagctgatatccaaggtgcaaaacaaagacctctttattcttcccgcttatctcctccagtgtgaggaagacatttcaagccaggcgtggtggctcacgcctgtaatcccagcactctgggaggctgaggcaggcagatcacctgaggtcaggagttcgagaccagcctgaccaacacggtgaaaccccgtgtctactaaacatacaaaattagccgggtgttgtggcacacgcgtgtaatcccagctactcaggaggctgaggcaggagaatacttgaacccaggaggcggaggttgctgtgagccgagatcactccattgcactccagcctgggcaacaagagcaaaactccgtctcaaaaaaaaaaaaaaaaaaaaaaaaaaaagagactatttttgctaccccgttcagtggctctttcagtgatatgaagttaaaaccaggtactgtgttcgctcacctgattttggttcttatgaagtgcttttttgtgtggatagttgttcagctggttgttcttctgaaggagatgattactggaggcttctattcagccatcttcccctgcctcctcataattgctatctctttattgattttctcatgttgtttgtatattggttgtatatcattttcctgatttccatttattctttgtctatggtttcctttagctcataaagcatatttaagacagtcgatgatgtctgtgactagtaattccaatgtctgtgcttcctcagagatggtctctgtcaaaagaacttttttttactataaataagccatacttgcccgtttctttgtatgttttgtagtatttttgttgaaaattggacttttggagtattataatatgttaattattgaaattggattcaccctttccttggagattgctgggttttgcttgtcaagggctagagccatctgtttgactttttaaaactgtttttgcaaaatgtgtattccttttgctgtgtagtcactgaagtttctattccattttttctgttttttttttgttgttgttgtttttgtttttgagatggagtcttgccctgtcgcccaggctggagtgcagtggtgtgatctcggctcactgcaagctcctcctcccaggttcatgccattctcctgcctcagcctcctgagtagccgggactacaggcacccaccaccacgcccagctaatttttttgtatttttagtagagaaggggtttcaccgtgttagccaggatggtctcgatctcctgacctcacgatccgccctccttggcctcccaaagtgctgggattacaggtgtgagccaccgcgcctggcctttttttttttttttttttttttttaatgagatggagtctcactttgtcgcccaggctagagtgcagtggcacgatctcagctcactgcaacctctgcctcccaggttcaagcaattctcctgcctcagcctcccaagtagctgggattttaggcctgtgccaccatgtctgcctaatttttgtatttttagtagagatggggtttcaccatattggtcaggctggtctcgaactcctaacctcaggtgatccacctgcctcagcctcccaaagtgctgggattacaggcatgagccaccgcgcccagccaatttctcaggtatttatttatagcagtataaaaacagactaatacacccgcgatcgttccatttatttccctcttgtttattatgagcacatatgtgttccaaaagacagtgtgcttagataaattgtttgtaccttcaaactagacacaatctaaatgtcaatccattggtgactgggtaagtaaagcatgctacattcatacaacagacattatagcaatgaacacgaatgaccttctgctgtacacaacatgaatgtatctcacaagcataatgttccaccaacaaagccagagcacataccgtatgattccacttatctccagtcagaaccaggcaaaaccatgctaggggtgttgaaggtcaggacagcagttaattggggaggaggcaaggggtaatgactgcatgaagggttgcatctgagccactgtcaatattgtatttcttcataggggtggaaattaaagatttgtgttcacactaaaaatttgtgaactctggtatgtgtgttatacttttttttttttttttgagatggagtttcgctcttgttgcccaggctggagtgcaatgacatgatctcagctcactgcaatctccgcctcccagttcaagcgagtctcctgccccagcctcccggtagatgggattacaggcatgcgccagcacgtagtagagatggggtttctgcatgttggtcaggctgggcttgaactcctgacctcgtgtgatccacccacctctgcctcccaaagtgctgggattacaggtgtgagccaccgcgcctggccaattttttattctttttgaggcagggtctcactctgccaccttcctaaggtgcggtggcatggtcatggctaactgtagcctagacctcctgggctcaggcagtcctcccacctcagccacccgagtagctgggactacaggttcacaccaccatgcccagttactttttgtaattttaccagagacggggttttggaatgttgcccaggctggtcttgaactcctgcactcaagtgatccgcccactttggcctcccaaagtgttgggattataggcatgagccacagggcccagccacaaatgtatatttaatttacatggaagcctactgttctcctccctccctccttccctccctccctccctccctccctctctcccttcctccctccttccttccttcctcagagtttctctcttgttggccaggctggagtgcaatggcatgacctcagtgcactgcaatctccgcctcctggcttcaagtgattctcctgcctcagcctcccgagtagctgggactataggtgtgcaccaccacgcttggctaatttttgtgtttttagtagagacaaggtttcaccatgttggccaggctggtctcgacctcccaacttcaggtgatccacccgccttggcctcccaaagtggtgggattacgggcgtgagccaccgtgcccagcctgcctttttcaagtagtcatatgtcttggagagcattctaatcagaatgaaaaacagctgagccattctgtttacttatacggtgaccaagccatctgctagtcattcccctattgatgatcattcagggtgttccctattgtttgtgactacatatggtgtggcaaagaatatctttgaatatattcatttcccacatgtatgggtatcttggaaagaaacacatttccagatgtggagttgttgggtcaaagggtgagtacattttaaattctgttaggtgctactttattttttaattttttatttttttttgagacaggatctcattctgttgcccaggcatggtggcacatgcctatgatcccagctacttgggtggctgaagctcgagaattgcttgagcccaggagatggaggttgcagtgagctgagatcgcaccagtgcagtctagcctgggtgacatagcgagactctgtctcaaatataatgcaacatggtgtccatggtccaggtgaggctgagctaggaggtctgaggtcagggtaggtctgacccctctgggtggtcctcagtgtcccacagcactgagcctgccaaggaggaggtgctaggggaatattcctgagggaatttagggagatgggagtgaatttgatgagcaggaggcaggggtctttgggtaagtgagagaattgaaaaggaaaaaactcttagccgggagcggtggctcacgcctgtaatcctagcactttgggaggccgaggcgggtggatcataaggtcaggagatcaagaccatcctggctaacacggtgaaaccctgtctctactaaaaatactaaaaatacaaaaaattagccaggcatggtggcgggtgcctgtagtcccagctacgtgggaggctgaggcaggagaatggcgtgaacctgggaggcagagcttgcagtgagccgagatggggccactgcactccagcctgggcaacagagcaagactgtctcaaaaaaaaaaaaaatcaattttaggaaagtgtctgagagagatcagtgactcagaagagtttgagtggggaagtgctcagaagccatggcttcttgcagggggtatggtcccacaggggcccacggggtttcctgggcacagggacccaagtgggacctcagcaggtgggtgggatgctgggagtggagggggctgaggggtgttctttcctttactcccttatggctgcagtgagctatgatcgtgccactgcactccagcctgggtgacacagtgagaccttatctcaaaaaaagaaaaagaagtccaggtgcggtggctcacacctgtaatcctagcactttgggagaccaaggtgggaagatttgctagagctcaggagttcaagaccagcctgggcaacatggcgaaaccctgtctctacaaagtaaacaaaaattagctgggtgtggtggcaggtgcctgtaattccagctacccaggaggctgaggcatgagaatcacttgaacccgggaggtggagtttgcagtaagctgagattgtgccactgcactccagcctgggcaatggagtgagactctgtctcaacaacaaccaccaaaaaaaaagaagaagaagaaaaagaataaaaaagaagatttagaggctgggtgtggtggctccccctgtgatcctagcacgttgggaggccgaggcgggtggatcacctgaggtcaggagttcaagaccagcctggccaacatggtgaaaccccgtctccactaaaatacaaaaattagccaggcatgatggtgggtgcctgtaatcccagctactcaggaggctgaaacaggagaattgcttgaacctgggagatggtggttgcagtgacccaagattgcaccactgcactccagcctgggtggctgagcgagactccgtctcaaaaaaaaaaaaaaaaaaaaaaaaagatctagaaaggagagttagggagtccatgaaaaatctctagccagccctcctgaagcactagacaggggaacaagtcagagtttgcaggaaaatctgggaagtcaggcatatccaactatcagagtcatggaaggctgttgcctctgcatctgatgttgagcccgaggtcactggtggttagcagggcagaaaattgagaagagataaacaggagtgtgggggaaacaaggtcccgaacacttgcatctgtctcaccctgcagggcagagcgagagcaaatgggaaccccctaatgcatctacatctgtcttttcccccatctaaatagagcaaccgtccaagaaaaatactgtgctaaacttctttcttccagttttcatgcaattttctcctttggccaactctaacttagaaccatatggggaaggggtttttttgtttgtttgttttgttttgttttcagagtcttgctttgttgcccaggctctggagtgcagtggtgcgagctcggctcactgcaacctccgcctcccaggttcaagcaattctcctgcctcagcctcccaagtagctgggattacaggcacccgccaccacgctcagctaacttttttgtatttttagtagagacaaggtttcgccatgttggccaggctggtcttgaactcctgacctcaggtgatccacctgtctcagcctcccaaagtgctgggattacaggcgtgagccgccgcacccagccaacttcatcactttcaatatgtcgtgccactctatcctagcctgtgaggtttccactgaagtctgctgccagacgtattggagctccattgtatgtttgtttttgtttttgtttttgagacagagtctcactcagtcacccaggctggagtacagtgacgaaatctcggctcactgcaacctgcacctcccaggttcaagcgattctcgtgcctcagcctcccgagtagctgggattacaggtgtgagccactgcgcctggcctcatgcctggctaattttttttgtatttttagtcgagacgggatttcaccatgttgcccagactggtctgtaactcctggcctcaagtgattcacccgcctcagcctccctaaatgctggggattacagacgtgaaccactgcacacggcctccattgtaagttatttgttacttttctcttgctgcttttaggaccctttctttatccctgatctttgggagtttgattattaaatgccttgaaggtagtctttgggttaaatctgcctagtgttctataaccttctcgtatttgaatattgatatctttttctaggtttggaaagttctctgttattatcccacttaataaactttctattccaatctctctactttctctttacggccaataaaactcagatttttcctttttgtggctattttctagatcttgtaggtgtgccttattctttttttttttttttttttttttttgagatggagtcttgctctgtctccaggctggagcacagtggcacgatcttggctcactgcaacctccgcctcccgggttcaagcaattcccctgcctcagcctcccgagtagctgggattacaggtgcctgccactacacctggctaattttttgtattttggtagagatggggtttcaccatgttggccaggatggtctcaaactcctgacctcgtgatccgcttgcctcggcctcccaaagtgctgggattacaggtgtgagccactgcgcctggcctttattcttttttattttttcttttgtctcctctggctgtgtcttgtcctgtctcatctcttttctcttctcttctgttctcttctgttctcttctcttctgttctcttctcttctttcttctcttctcttctcctcctctcctctcctctcttctcttctctttttgagacagagtctcactttgtcgaccaggctggagtgcagtggtgctgcaatcttggctcactacaacctccacttcctgcgttcaatcaattctggagcctcagcctcctgagtagctgggattacaggcatgcaccaccatgcccagctaatttttctatttttagtagagacaggatttcactatgttggccaaactagtctcaaactcctgacctcaggtgatccaaccacttcagcctttcaaagtgctgggattacaggtatgagccactgtgcccggcctgactgcatattttcaaatagcctgtctttgagctcaccaattcttcaggttgatcaattctactgttcagagactgatgcattcttcagtgtgtcagttgaattttttctacttaatttttttttttttttttgagacggagtctcgctgtgtcgcccaggctggggtgcagtgacacgatctccgctcactgcaagctccacctcccgagttcatgccatcctcctgcctcagccttccgagtagctgggactacaggcgcctaccaccacgcctggctaatttttttgtatttttagtagagatggggtttcaccgtgttagccaggatggtcttgatctcatgacctcgtgatccacctgcctcggcctcccgaaatgctgggattacaggtgtgagacaccgtgcccagcccctttctgcttaatttttaaaaattatttcaatctgtttggttaatttatccgataggattctgaatcccttctctgtgttatcttgaatttcattgagcttcctcaaaacagctgttttgaattctccgtctgaaaggtcacatagctctgtcacaatggggttggtcactggagccttgtttagttcacttggtgaggtcatgttttcctggatggtgtcaatgcttgtggatgttcgtcaatggctgggcattgatgagttcagtgtttattgtagtctttgtagtctgagcttatttgaacccatccttcttgggaaggcttgccaggaaattgagtgttgtgaactaaacttttggtcactgcagctgtatctgcattagggggcaccccaggctcagtaatgctgtgattcttgcagcatcttagaggtgctggccaggcgcagtggctcacgcctgtaatcccagcacattgggcagcctaggcaggcggatcatctgaggtcgggagtttgagaccagcctggccaacatggtgaaaccctgtctctaccaaaaaatacaaaaatttgccaggcgtaggggtgggcgcctgtagtcccagctacttgggaggctgaggcgggagaatcacttgcgcatgggaggtggaggttgcactgagtggagattgcagcactgcattccagcctgggcgacagagtaagaccctgtctcaaaaaaaaaaaaaaaaggaatcttagaggtactgcctcagtggtcttggttaagattcaggagaattccctaaattaccaggcagaaactcttctcttcccttactttctccaaacaaacgcagtctctctatctctgtacggagctgcctggggctgctggaggggtgacacaagtacccttgtggccaccaccactgggactgcactgggtcagacccaaagccaacacaccactaggtctcacccagggcccgtggcaaccactacctggcttccaccaatgttcacacaaggcccaagggctcttcggccagcaggtggtgaagcctgccgggcttgtgtccttcccttcaggatggtgagttctctcctggcccagggcaggtccagaaatgccatctgggagccagggcctggagacagaaaccttaggaatctacctggtgctctattctactgtggctgagctggcacccaagccacaagaaaaagtctttcctacttgatatggtttggctgtgtcccacccaaatctcatcttgatttgtagctcccataattcccctatgttatagggggtacccagtgggagataagtgagtcatgggggcagtttcccccatactgttcttgtggtattgaataagtctcatgagatctgatggctttataaggggaaacccctttggcttggttctcattctgtcttgcctgccaccatgtaagacgtgccttttggccaggcatggcagctcacgcctgtaatcccagcactttgggaggccgaggcgggtggatcatgaggtcaggagatcgagaccatcctggctaacatggtgaaaccccgtctctactaaaaactacaaaaaattagctgggcgcctgtaatcccagctactctggaggctgaggcaggagaatggcgtgaacccgggaggcagagcttgcagttagcccagactgtgccactgcactccagcctgggtgacagagtgagactccatctaaaaaaaaaaaaaaaaaaaaaaaaaaagacgtgcctttcagcttctgccatgattgtgaggcctccccagccacgtggaactgggagttcattaagcctctttttctttattaattacccagtctcaggtatgtctttatcagcagcatgaaaacagactaatacaccactcttccctcacttttcctcacacaggagtctctctctgtggccaccactgctccaggcccatggcaggtactgcctggctactgctgatgttcactcaaggcccaggccctcttcagtcagcttgtggtgagtgctgccaggcctgggtcttttccttcagggaagacagctcccctctagcccagggcaggtccagaaatgctgtgcaagagccaagacctcaattggggatgccagcagctgctgggtgctctaccctactgtggccaagctggtgtccaagatgcaagacaaagtctcctttactctttcctctcctttcctcaagcaggagtctttccccagggccaccacagctgggaatgcgctgggtcacacctgaaatcagcacggcactgggtctcacccaaggcctgcggcgagcactctctggcaaccactgatgtttattcaaggcccaagagatctttagtcagcaagtaatgaatcctgccaggactgggtccttcctttcaaggcagcggcttcccttctggtccagggtgtgtccaaaaatgtcatccaggagttagggcctggaatgggggcctcaggactccgcctggtgccctatcctcctatggctgagctggtatccaagttgcaaaacaaagacctcttgacttttcgtctcctcttctcaagcagaaggaaggagtctctcccggaactgcaagctatactgcctggggtttggggctcgggggctcaagcactcccttggctgcctcagccaatgtctcagtgggcctcatgccctccaggtccacttgttctgagcccagcaaggcaccaggacttgcccagaaattgcagtccttgtggcctgactgcctttcaagtttatttatttatttatttatttatttatttgagatggagtcttgctgttgtccgggctggagtgcaatgacgtgctctcggctcactgcaatctctgcctcttgggttcaagcgattctcctgcctcagcctcctaagtagctgggattacaggcgtgcgccaccattcccagctaatttttgtatttttagtagagacggggtttcaccatgttggtgaggctggtctcgaactcctgacctcgtgatccgcctgcctaagcttcccaaagtgctgggattacaggcatgagccaccgcgcccagcctcaagttgatttagggtcccagagcactttggcccgcagtggctaggcatgccagaactcaggttctcaccactagaatagatgatttccctctgtctaatgatcatttaaatgctccctccatgggtggtgtctgatttctgccccatggtgctttccactgtaatagaacagcgctgagttccaatgcaaagcctcaaatcagtcactgagctctccctaccccaaatgcacagattctctctccttgccatctgactgctgccaggagatgtgggaggggtggcattttggggtagcacctcaccccaaaagcccattggcttaaaatagcagtcccatcccaaaatctcaaaccaccccaaaagctcattggcttaaaatagcagtcaaatatgacatctcatggttcagtaggttaagtgggtttaaccagtcgattcttttttttttgagatggagtctcactatgtcgcccaggttggagtgcagtggcgcaatcttggctcactgcaatctctgcctccccggttcaagcaattctcctgcctcagcctcccgagtagctgggattacaggtgctggctaccacacccggctgatttttgttttgcctttttttttttttttttctgagatggagttttgctcttgttgtccaggctggactgcaatggtgtgatctcggtttactgcaaacctccgcctcctgggttcaagcgattctcctgcctcagcctcccgagtagctgggatgacaggcacccaccaccatgccccagctaatttttttgtattttcagtagagacagggtttcaccaagttggctaggctggtcttgaacccctgacctcaggtgatccatgtgcctcagcctcccaaaatgctgggattacaggtgtgagctactgcaccctgccaaatgagccaatgattgggtggagtttctcaactagttgcattcagatggcagctggggctggagtcatccaaaggctcagctgggctggaaatccaagatggcgtcttacatgtctgacatctcagttgggatggctagatcagctgcggctgaccagttatctatctctctctccatgctgcctcttgccatgcccagcttcagcttctgcatagcatggcagtctcaggatattcagaattttttttttttccccagatggaatctcactctgccaccaaggctagagtgcagtggcatgatcttggctcactgcaacctccacctccagggttcaagtgattctcgtgcctcagcctcctgagtagctgggattacaggcatgcaccaccatgcctggttaatttttttgtatttttagtagagacagggtttctccatgtttgctaggctggtctcaaactcctgacctcgcgtaatccccccaccttggcctcccaaagtgctaggattacatgtgtgagctgccatgcctggctgaaaataatagatttatacctaaccatactaataattgcattgactctaaattatgtaaacatccaattataagacagagatttcagactaaatgaaaaagcatgacccaactctatgctgcccacaagaaattgtgtgtgtgtgtgtgtgagacggagtcttgcactgtcgcccagactggagtacagtggcatgatctcagctcactgcaacctccacttcccgggttcaagcaattctcctgcctcagcctcccaagtagctgggattacaggtgcccaccaccacacccggctaattttttgtatttttagtagagatgaggtttcactatgttggccaggctggtctcaaacacctgaccttgtgatctacccgcttcagcctcccaaagtgcagggattacaggcgtgagccctgcacctggccaaaatacactttaaatagaaagacgttctgtacaaaagttaactcaaaatggaccacatcactaaatgcaaaacttaacatttctagaaggaaacataggagaaaatctttgtgaccctagatgatgcaaaagttcattatgtacaagcatgatcataagagaaaatcttgataaattagattccatcaaaattaaaaacttctgctcttcaacaaacattattaggagaatgaaaagataagccaaacagtgggagaaaatatttgcaaattacatacttgataaacaactagtatccagatattttaagaacccttaaaagtcaatagctagaaaacaaacaacccaattatttaaaaagggcaaatgatttgaataaacacttcactaacgaagatatgcagatgacaaacaagtacacaaaaagctgctcaacatcctcagtcgttagagaaacgcaaatgaaaaccacaaggtcactctccacctattagagtggttatcgtggagaaaagaggcagagtgattgcttgaggccaggagtttgagaccaacttgggcaacatactgagataccgtctctacaaacataaaaattaggggccgggcgcagtgactcacgcctgtaattccagcactttgggaggccgaggcgggtggatcacctgaggtcggcagttcaagaccagcctggccaacatggttaaaccccgtatctagtaaaaaaatatatataccaaaaattagctgggcatggtggcgtatgcctgtaattccagctatttgggaggctgaggcaggagaattgcttgaaccccggaggtggaggttgcagtgagttgaaatcccgtcattgcactctagcctggatgacaagagtgaaactctcaaaaaaaaaaaaaaaaaaaaaatctattattttcatggtttttcctgattcatctggtcattgttctctttttccaccttcttttggattaatcaagtttttttttttttttttttttttgagcaaggatctcactcttttgcccaggctggagtgcagtggtgtgatcatggctcacttctgcctcgaactcctggacaaaagtgatcctcctaccacagcctctccagtagctgagactataggcgtgtgcccccacacctagttaaatttttttttttttttttaatagagatggtgtctcatgtgctgcccaggctggacttgaactcctgggctcaagtgattcctcccgccttggcctcccaaagggctaggattataggcatgagccactatgactggctggattaatcaagtaatttttttatgattccattttatctcttttgtaggcttattagctatagctctttgttttattattttatttatttatttatttgagagtttcactcttgtcacccaagctggagagcagtggcacgacctaggctcactacaacctctgccgcctgggttcaactgattcccctgcctcactcagcctccagagtagctgggattataggcgcctgccaccatgcccagctaatttgttttaatagagatagggtttcaccatgttggccaggctggtcttgaactcctgacctcaagtgatccaccctcctcagccttccaaagtgctgggatgacaggtgtaagccaccgcgcccagctattttattttttttgagacagagtctcactctgttgcccaggctggaatgcagtggcacgatatcggcttagtgcaatctctgcctcccgggttcaagtgattttcctgcctcagcctcctgagtagctgggactacaggtgcccgacaccaagcccgactaatttttgtatttttagtagagatggggtttcgccatgttggccaggctggtctcaaactcctgacctaaggtgatccacccgcctcggcctcccaaagtgctgggattacaggcgtgagccaccgcgcctcacctgccttgtttttttaatggtcactgtagagtttatagtccacatctttaacttctcgcagtctacattcaagtgctactgcactccacactccagtgtgggtgacagagcgagactctgtctcaaaaaaaaaaaaaaaaaaaaaaaaaaaaaaacctagctgggcgtggtagcgcacacctatagtctcacctactcgggaggctgagtcacgagaattgcttgaacccaggaggtggaggttgcagagagctgagatcacaccactgcaccccagcctgggagacagagcgagactccatctcaaaaaattaaaaaaaatttttgcctagtgctacacataggaatgtgcaggtgcacacgcatacacctgcatacacacacatgtgcacaggtacacataggagtgagtaaaaccagtgaaattggaagattaaggtcttagaattgaactaatgtcaatgtcctgttttgatgttgtattacagttatataagatgttagcatcaggtaagtggatgaagggcaaacaagaccaccatgtactttttttttttttttgagatggagtcttgctgtgtcacccaggctggagtgcagtggcgaaatcttggctcatcgcaacctctacctcctgggttcaagcgattcttctgcctcagccttccaagtagctgggattataggcacctgccaccacgcccagctaagttttgtatttttagtagagacgggttttgccatgttggccaagctggtctcgaactcctgatctcgtgatctgccctccttgacctcccaaagtgctgggattacaggcatgagccaccacacccagcctctctttttgtaacttcttatgaatctataatctcttagaaataaaaataatcagtcaggtgccatcgctcatacctgtaatctcagtactttgggaggccgaggtgggtggatcatttgaagtcaagactttgagaccagcctagccaacatggcaaaacgctgtctctgctaaaaatacaaaaattagctgggcgtggtgtcgggcgtggtggctcacgcctgtaatcccagcactttgaggcccaggtgggcagatcacctgatgaggtcaggagttcgagaccagcctgaccaacagggtgaaacaccatctctactaaaaatacaaaaattagctgggtgtggtggtgggtgcctgtaatcccagctacttgggaggctgaggcaggagaatcacttgaatccaggaggctgaggttgcagtgagctgaggctgtgcmattgcactccagcctgggcaacaagagtgaaactatctcagaaagaaaaaaaaaaaagcccacaagtatttggaaagtaaataacccagaagtcgaagaagaaatcaaaagagaaagtataaactacataaaactcaatgaaaaaaaataacatatcaaaatacatgacatgagataaagtaatgcttagaaagacattgatagatttttaaatgcttaattagaaaagaggaaaaggaggactggggagacggtggtcaaaggatacaaatttcagttaggaggagtaagttcaggagatctattgcacaacatggtgactacagttttgttttttttttgttgtttgtttgagatggagtctctctctgttgcccaggctggagtgcaatggtgctacctcggctcactgcaacctctgcctcccgggttcaaaccattctcctgcctcagcctcctgagtaactgggattacaggcgagcaccaccatgcccggctaatttttatatttttagtagagatggggtttcaccatgttggccaggctggtcttaaactcctgacctcaagtgatccgcccaccttggcctcccacagtgctgggattacacgcataagccactgcgcctgaccaactacagttaataacaatgtattgtatacttgaaaatttcgaagagagtagttctatttctttattttattgttattattgtttttttctgagacagtgtcttgctctgtcgcccaggttggagtgcagtaatgcaatctcggctcactgcaagctccgcctcccggtttcactccattctcctgcctcagcctcccgagtagctgggactacaggcgcctgccactacgcccagctaattttttgtatttttagtagagacgaggtttcaccgtgttagccaggatggtctcgatctcctgatctcgtgatccgcccgcctcggcctcccaaagtgctgggattacaggcgtgagccaccatgcccggcctattttattttttttgaggcggagtttcgcccttgttgcccaggctggagtgcagtggcaccatcttggctcaccatctttgctcaccgcaacctctgcctcccgggttcaagcgattctcctgactcagccttccaagtagctgtgattataggcatgcgccaccacgcccggctaatttttgtatttttagtaaagatggggtttcactgtgttagccaggatggtctccatctcctgacctcgtgatccgcccacctcagccacctcccaaagtgctgggattacaggcgtgagccattgtgcctggccagaactctgtctcaaaaacaaaacaaaacaaaacaaaattatgcacatgaaaaacatcagtcacaaaagactacgttatgtatttccaaatgtgaaaagtccaaaataggtagattaatagagacagagagattagtgtctgcttagggctagaaagttactagggagattggatattaactacaaatgagtatgaggtttctttatttaaaatttttttattgtgctgaaatatacataaaatttactattttaacttttttttttttttttttttttttttttgagatggagtcttgctctgtctcttaggctggagtgcaggggcacgatctcggctcacttcaacctctgcctcctgggctcaagtgattctcttgcctgagcctcctggagtagctgggattatagatgcgccaccacgcctggctaagttttgaatttttagtagagatgtggtttctccacgttggccaggctggtctcgaactcctgacctcacatgatccgcccacctcggcctcccaaagcgctgggattacaggtgtgagccacctcacccggccacttttttttttttcttttttaatgagacaaggtctcacctatcatctaggctacaacgcagaggcacaatcacagccaactgcaaccttgaacacctggcttcaggcgatcctcccacctctgtgtcccaaactgctgtgtgagccactgtgcccagccaaaagctgtttttcaatggaggaccaacatctgaaaagtacattgacaaactgaggctcttatatgtttaattcaacgcctacagggcagtggcagtggctcacgcctgtaatcccagcactttgggaggatgaggcaggaggatggcttgaggccaacctggtcaacatagtgagactctgtctttacaaaacaaataaaatattagctgggtgtgctggcacgagcctgtagtcccagctactcagaaggctgaggtgggaggatcacttgggctaggaggtagaggctgcagtgagctatgatcgtgtcattgcactccagcctgggcaacagagcaaagaccctgtctctaaaaaataaataataaatgtctatggactgcacaatattgttgattcctcaactcctctcttgctcttttgcatattggcaacataaaaagtgtcattttcgggctgggcacagtggctcatgcctgtcatcccagcactttgggaggctgaggcgggtagatcacttgaggtcaggagttggagaccagcctggccaacatggtgaagccccgtctctactaaaaatacaaaaattagctgggtatggtggtggtggagggggggcacctgtaatcccagctactcaggagcctgaggcaggagaataaattgcttgaacctgggaggtggaggttgcagtgagctgagatcgcgccattgcactctagcctgggcgacagaatgagactctgactgaaaaaaaaaaaaaaaagaaaatgtcattttcagagggcaaagtgaggaaggtgcaccctcaggacattcttgcctcagcctggggaaagagagtttaagcaattcccccagaaaggcacaggaacctcagcccagagaggggcagcttcctgcctcgggtcaggaagcacagccttgggctccgagagtccctcgtctctacctccccaagttcaaatgtgcatgcgtgaagttccaaacccagccccagtgctaacccctggctgcctcctctttctgacttctcagggaaaaaaaaaaaaaccacatacacacaaaaaatcccacaagtcaggaaacatccatcacgggctgtccagcccaggccggaggggcaggagtcagcagggaggtgacctcaaggtctccgtggggactaggatccggcggggctgggggtgagaggctggaaattttcccaccccgagactttcctgcgtcaacccaggagggcgccctggatgccgccagccctgcccccaacctccttcctctcctgacagggcagcttcccggctaaggatggatggggagggtgtgccaagatggagccaccaggaccaggaatggacaggcactttgagattgaccagacgagggaccctggctcagagtggcgaaggcctggcctcagagccacacagccaggaggtgtacatgggttggcgtcgctcccagcacatgcagcctccctctacctccactaccctgcccaggagctggagcccagcccggccttgggtgtgtgagaagccactggcccggggccctgcttccccggtccttcctccccacaacacactcaggactcagcccttccttgtgttaaatagaaacctctttattctaagtatcgaacgttccttaatacattggattggggccagaccttgaggtgagggaaaggggcgggggagctgggatatttctgtagagacttccagaacgacactcaccactctgggctatggcaggaggggaggtgctgggaacaggcttcatggccttgggaaaatgctttgtctctttggcctctgtttccccctaccttttttttttttttttttttttgagaaagggtcttgctttgttgaccaggctggagtgcagtggcacagtcatagctcactgcagcctcgaactccagtgatcctccagcctcagcctcaccagtagctgggactacaggcacacaccaccgtgcccagctaattttttattttttgtagagatagggggcaggtctcactatgttgcccaggctggtcttgaactcctgggctcaagcaatcctccggcctcagcctcccaaagtgttgggattacaggcatgagccaccgtgcctggcgtttgtttcccttctgtacagggagtttggggttgggtgaaaagacatctaagggtctttctatcccaggggtgtgtggtcccaggcagggagtcaggaggggcgccgtacgggaggttggcttgtcagcagcatagatggggtcactaaggccggcggttgggtgaccctcagcgctgggcccgaggtcgcgctagagacggaggccggggccgaggcagacaggccaaactgggcctggccagccgggagagggggaggcggcccaggaagagagggaggctgagacagaaagatgggcggggcacagggatgtctgcaaagaaggcacggtcccgagggggtgacagggctccctcctcagagagttccaggtcccgggccacggccaggatctcctggcgggcggctgtgttgcgcaggccacggatgtcgaggagggctgccacgtgcttctgcctgtggggagaggaacagacaggtgcatgcagatccccagctctagacacacacccaacccagccgtggaccccacctgaccccctcacctatcccagaaattgcctgagttctggggcctctgtgtcccctccagagccttccctccaatcagctcccttgcccaggccctcacctcataccagctccctccagaacttcacttccaaccatctccaaatcccccttacaaccaaccccagaaccagccctgggatcttccttttcaccccaagcctcagctcgtgattaaaattcaccttctcagctgggtgccgtggctcatgcctgtaatcccagcactttggggggccaaggcaggcggatcacctgaggtcaggagttcgagaccagcctggccaacatggcgaaaccctctctctactaaaaatacattaaaaaaaaaaaaaagctgggtgtggtggcaggcgcttgtaatcctagctactcaggagtctgaggcaagagaatcccttaaacctgggaggcagaggttgcagtgagctgagatcgcgccactgcagtccagcctgggtgacacagcgagactccatttcaaaagtaaaaaaaagaaagaaaccttgtaccccactccccctaaatcctcagccctaggtacctcctaatctcaagctcaaccccctaaacccaacccagctagcaaactcttaaacttagctacagattcaagttctgactcatgatccaatattcaagttcagaaactccacatcagcaagaatactgggacttcttgggaccccatgggactccaggaatatgtgccttcccaaggacatgaccttatcccccagaatcagaactgaccaccctgaatcaattccaggacccccaccctcagtgctgaaactgaaacccgctcatgcctcactccttgtttttctggggttctgtttctctgagtatgtctgagaatgtgtctgcccaaatagcactgcaaggactggcgttgctccggcagccaccaccactgccaccaccatccagcactgtcacatggtggtgtggtgtgctgatctggtacactagtttttttgtgtgtttgtttgtttgtttgtttgttttgagacagagtcttgctctgttggccaggctggagtgcagtggcgcgatctcagctcactgcaacctccgcctcctgggctcaagcaattctcctgcctcagcctcccgagtagctgggattacaggagtgtgccatcacacctggctaatttttgtatttttagtagagacggtgtttcaccatgttggccaggctggtctcgaactcctgacctcaggtgatccacctacctcggcctcccaaagtgctgggattacaagcgtgagccaccatgcccggccgatctggtgtactagttttagagccagtctactgcctgggttcaagttccacctttgccacttgctaggcgtgatatttcaatagctttaattataccccttacttataggccaagcgcagtggctcacgcctgtaatctcagcactttgggaggcagaggcaggcggatcacctgaagtcaggagctcaagaccagtgtggtcaacttggtgaaatcccatctctactaaaaatacaaaaattagccgggcgtggtggcacatgcctatacttgggaggctgaggcacaataatctcttgaacccgggaggcagaggttgcagtgagctgagatcactgcacttcagcctgggcgacaaagtgagactctgtctcaaaaaacaaaacaaaacaaacaacaacaaaataccccttataaagttggcatgggctgggcaacggtggctcacacttccccattcgtgggaagccgaggcaggcagatcacttgagcccagaagttcgagaccagcctgggcaacatggtgaaacccatctctgcaaaaaatacaaaaaattagctgggcattgtggtgcatgcctgtggtcccagctactcagaaggctgaggtgggagggctgcttgagcccaggaggtcaaggctgcagtgaaccgtgattgtgccactgcactccagccagggaaacagagtgagaccctgtctcaaaaaaaaaagaaaaaaagttggcatgtaagatgcttatttaggtctgaaataagaactcattgagtgagaactggaattgttactatagtcatggatgatgatgatgatgatgatgatgataaatttccctaataaccctatgacgagaatactactatccccatggaacggatgaggaaactgaggctccgagaaggtcacctacaaaggaagtgacctggcaggagttgaatgccgcctgcgcctgccgctgtcccagtgcgtgtgcgcccgtgtgccctgcgtgtccctgagtcccctgcggctcccctgcgggctggcccttcctgcctccaggcagccctgcgcccccctgccctgggcttcctgtgaccgcctgtttgtttgtgagccctggtggcggtggcggcggaggcagcagcggcggcaggagaaggagggaaatcttattaataatgccctggttccagcaggaaacggccgtcagacacgctcaccggctccctccctcaggaggcaggaagcacagggacggatgccaaggccgccaggagacctcggccaggcacggcgagccctggcccaggcggggtgtctcacctgatgtctgggtagtcgcgcaccaacactcccacctccacctggatgctgggcgtgtcttccagctgcatgacttcagccaaatggggcaccacggcatccagccacgaggcctgggactcctgcaggggagggagggtgcggggtcacaccctcccaagattgaccctgccaattcctgcccctcctggcttgttataccatctctaaaatgtagcagaaaccaggggtggtggctcaagcctgtaatcccagcactttgggaggaggccgaggcgggtggatcactagaggtcaggacatcgagaccaacctggccagtatggtgaaaccccatctctactaaaaatacaaaaattagccaggcgtggtggtgcacacctgtaatcccaactactcaggaggctgaagcaggagaatcacttgaaatcgagaggcagaggttacagtgagcggagactgcaccactgcactccagcctgggtgacggagcgagactctgtctcaaaaataaagaataaaaataaaaataaaaaataaaatgtagcagaagacatactatggccacatttgagaaaaatccataatataatctcctcccagttttgcaggtaatttggaactctgggaaacatctccaaacctcttccacgtctgcaaaatcttgcctttgcggggatggagactggacaaagtgtacaaggaagctccctgcattctttcttacatctgcatgtgaatctacaattatctcaaaaattttccaaagaaaacattccaaggactccgggcttggaactccaagaagagcgactgaatgaggcccttccagcccagctgaatacaactgggtacaaataagatctggcggtttttaattccagggtttagaaatgttaggatttctgtgtttctgttgcatgtagtttctctgtacgttcatggagtcttttttttcttttttttttgagacagagtctcactctgtcctccaggctggagtgtggtggcaggatctcggctcactgcaacctccgcctcttagttcaagcgattctcctgcctcaacctcccaagtagctgggattacaggcgtgagccaccacacccggataattttggtaatgcaaggagttttaactctgagccaggcactgtccaaagcacttaacaggaattaaccaatctgatcctcaaaacaatggatagggaccattattcgccttatttaacagccgaggaaagcgcccagaggcgagttctcagagcaagaaagccaggttttaagtgcaaagggtgtcggtcaaagttactggttgctattgacccgaagttgggtgagagtttctgtcctgagctctgcccctctccccctggcttttgggacctgagattctcggaagccaagccttgtcctggtttctgaaacacccccaaccgcgtcccgacactgaccagccgccggaacagcctctgcagttgcgccgcgtcctcccggagcctgccggccacgcggctgcgggtccgcgccgagctgcagcgcaggcgcccacggagcaggggccgcacgtactcgaccagcgcccgccggtgtagctcggctaccagcgcctggaggcggaggagggaaacccgaggggtgtgagccatgccccacggactcccatcccgccagtctgaaggccacccccgccccactcgcccacatccactccgggcacccatgggcacccttcccgtgcccacgccccagtccccagcccctgagctatcctaggatgccttccctggccccctaattagcccgcggacagtctctgccggtccccaaagggtgctccatcccagcctctccccattccccaagctccactctcaggggccctgactcagtctgcaccccgccttacaccccagttccacgcacatgcctccccgcagaccccgggcaggggccacctctcccatccacagggagccgctccccaccttagaggggtttcctccagcaggagcgttcttggctctcccaacctcccaatctcccctcttcccgtccctttcccctttcctcctcccctcttttcccccacccccacctcccctcccctcaggcaggtgcacctggtaaggctcgtcctgcattctgcgcagggccagggcctgggcacccagcgtgcccacgatgccatccagggcctccgggctgctcagccacttccggcgcatcagcttgttgaagtgtggctggcagggacagagtagggggtcacgctctcctccctcccaccctccctcttcacttaggaataagttcctgcaaccctgctccgtgttgaaccagggctgtgcggtgctgggaacacaaggggaagagatagccccagccctggcatccttggactcacagtccagaaggggagagagactggtccccaggtagtgatgacccaaagctggcaaggctgggactcgggaacccaggggtttaggaagcccagaggggatgcctgactcagcatagagccatggagggcttcctggaggaggggacaccggaactgaggccctggtgatgatcttccttagccaagtgagggatgggggagggggagtggctcaatgggagaaaatagtgagtattaagaaagttcagatttcagatgggcatgtcagggagaggaccagcgaaaaggtcagtgtggttgatgaaaacaggggacttcatttaaaaattattaagggccgggcacagtggttcacacctgtaatcccagcactttggtaggccgaggcaggagggtagcttgagcccaagagtttgagaccagcctgggcaacattgcgagaccccatctctacaaaacatttaaaagttagctgggactgcgcgcagtggctcacgcctgtaatcctagcactttggaaggctgcggcgggtggatcacctaaggtcaggagttcaaccctgtctctactaaaatacaaaaattagccgggcgcggtggcgtgcaactgtagttccagctactctggatgctgacacagcagaattgcttgaacctaggaggtggaggttgcagtgagccgagatcacaccactgcactccagcctgggcgacagagtaagactccgtctcaaaaataagtaaatcaattaaaaataataaaaattagctgggtatggtgtcatgtgcctgtagtcccagctactcagaaggctgaggtgggaggatggcttgagcccaggagttcaggctgcagtgaaatatgatcatgatactgcactccagcctgggtaacagagggaggccccgtctcaaaaaaaaaaaaaaaaaaaaagagaaaaagtaagaactttaagacatatttttaaaattcattaactatgcacagcccttaagggaaggaggacggattgcttccacattccacttcctaggtctggttgagaaaacatgttccccatctggagctcttaggaaggagtatagtaaatgcctcagttaataacatcctcctttttgaaagttgccttttctctccacccttgagtagatccggtatttgacgaaacttgtgaaagtgggtggaacctgtcttgccccctcttttctagaatgcactgtatatgcgactgtgactttcaaggaaatgtgtttgccatttgctgattttggggggaagttaatttctaacttcttccactggtaaatgaaggaaagtattgcaccttgcaaatgcaccaaatgaattgagttcaccattttaaaaaccgtcttttggccaggcggatctcattggaaaattattaaggggccaggcatggtggcttacacctgtaattccagcactttgggaggctgaggtgggtggatcacttgaggtcaggagttcgagactagcctggccagcatggtgaaaccccatctctactaaaaatacaaaaaattagctaggcgtgatggtgggcgcctgtaatcccagctactcgggaggctgaggcagtagaatctcttgaacctgggaggcggaggttgcagtgagctgagatcaagccattgcactccagcctcagcaacaagagcaaaactctgtctcaaaaataaataaataaattaattaagggctgggcacagtggctcatgcctgtaatctcagcactttgggaggctgaggctcaagaattgcttgagccaagggcaacatagtaagactccctctctataatttttttttgtttgtttaattagctgggcatggtggcccacactgtggtcctagctacttaggaggctgatgtgagaggatcatgtaagcccaggtggttgaggctgcaatgagctatgatcatgccattgcactccagcctgggcgacagagcaagattctatctcaaaaaaacaaacagaaacaaaaacaaaactctttttccccctgcccaaaacaaaaaataataataactttaagacagtgacagaagagcattaaaccaagattgggcctttcgaagtgtgtgttttgggggtgagggaagctgtgcgaccctgaagctggcattggggtttattccaggcataagacagggaggggagaggtgaggctggggcagggctggattgcacatggcctcctgggcttggggagaagccccagctttctcctgagggcactaggcagccatggccagtttgagctggggagggagagggtcagatttgtgctttaccgagatgggaggagacgagactgaggtagaaatgatggaggaggctggaaaaaaggggaaagtggagatagggaggggatgaaagggggtgaggaaggggaagaggagaatccaagtggtagaattcataggatgaagtgagtgaccaccacctgtggggagggaagggaggtatctggaggacaccagagaccctggagatgggcaggccgtgggtctctccctgagacaggggcggggggagggtcgggggagaggctgcagtctgggtagacacagggcatgtgaagttcggagatatccccaagatggtatccatgggagggcgtctaattccctcttcagctcagcctcagcacctgctctctcaccctgacagcagcccagttttcttttttgtttttttgtggttttttttttttgaaagatagggtctcactatattgcccaggctggtgttgaactgctgaactcaagcaatcctcccacctcacagcctcccaaagtgctgggattacaggtgagagccaccatgtctaatgtgttgctgggttttgtttgtttgttttgagacggaatctcgctctgtcgccaggctagggtgcagtggcgcgatcttggctcactgcaacttctgcctcccagtcaagtgattctcctgcctactctcctgagtagctggggctacaggcacgtgccaccatgcccggctaatttttgcatttttagtagagatggggtttcaccgtgttggccaggatggtctcttgaccttgtgatctgcctgccttggcctcccaaagtgctgagattataggtgtgagccactgtgcccagcagggctttttttttttttttttttttgatacagggtcttgcactgtctcccaggctggagtgctacggtgtgaacacagctcactacatcctcaacttcctgggatcaagcgatcctcccacttcagcctcccaagtacctgggactacaggcacccaccaccacacccagcttattgttttttattttttgtagagaagaggcctcattatgttgcccaggctggtcttgaactcctgggctcaatcgatcctcctgcctcagccttcaaaagtgctgggattacaggtgtgagccaccacgcccggccagctctgttttctgaacctccaaaaatggagcaaggcatgagggaacccacataatgcctgggccctggtgattctcccagggtccccaccctggctgatgctcacatacacatgcacactcatgcacacggcgcacacacacacacaaacactccctcaaaagcctacagctgttcacacactcacacaggcatgcgagcacagcactgtgtcctgtctcttcatgtctctagctggttgtttttctctccttttttttttttttttgagacggagtctcactctgtcgcccaggctgaagtacagtggcatgatctcatttcattgcaacctctgcctcccacgttcaagcgattctcctgcctcagcctcccgagtagctggaattacaggcgcttgccaccacgcctggctaattttttgtatttttagtagagacggggtttcaccatgttggccaggctggtctcaaactcttgacctcaagtgatctgcctgccttggcttcccaaagtgctaagattacaggcatgagccaccacgcacagtctatctctagctggttctgatgtctctccctctgtccctctgtcccagtctctctcctttccttcctccctcacctatcttgttttctcagtctctccctgtttcttttgcttctgctctctctgtctgtgtctctctctccctcaaaacatacatagtggtttataaggccaggcacagtggctcatgcctgtaatcccagcctgggtgacagagcaagactctgtctcaaaaacaatttaacaaaaacaaaaaagcaaacatacatagtggtttatagactaagaccgtagattcgcaatgggctttgccacttgctggtctcatcttcctcacctgtaaaatgaatctacaacccatctcataggattgcagtgagaattaaacgagccgatactctcaagcacctggcacagtgagtcctgagaatgtgtttgctgttgctataaagtctgtatatttaagatagcaagctgggtgtggtggcttacatctgtaatcccaacactttgggaggccaagtcaggaggatcgcttgagcccaggagttcaagaccagcctgggcaacatagtgagaccctgtctctaccagaaatacaaataaataggcagggcgaggtagctcacacctataatcccagcactttgggaggccaaggtgggcagatcacgaggtcaagagatcgagaccatcctggccgacatggtgaaaccccgtctctactaaaaatacaaaaattagcatggtggcgtggtggcaaccgctatagcatggcaggtggcagtaagtgctttggagaaaaatagcagggagtcgggaggggggtttggtctaggggcttctgtttttttgttttttgagagggaagtctcgctctgtcacccaggctgcagtgcaatggtgcgatcttggctcactgcaacctcagccccctgggtacaggcaattctcctgcctcagcctccagagtagctgggagtacaggtgtgtgctgccacacctggctaatttttgtaattttagtagagacggggttttgccatattggccaggctggtctcaaactcctgacctcaagtgatccgcccaccttggcctcccaagtgctgggattacaggcgtgagccaccgcacccagtcagagcttctgttttaaatggggcaatcagcgaaggtcgcactgaggtgacatttgagtcaagacttgaggcagggcatggtggctcacacctgtaatcccagcactttgggaggccgaggtgggcagatcacatgaggccaggagtttgagaccagcctggccaacatggtaaaacaccatctctactaaaaatacaaaaaaattagctgggcgtggtggtgcatgcctgtaatcccagctactagggaggctgaggcaggaaaatcgcttgaacctgggaggcagaggttgcagtgagctgagattgtgccattccactccagcctgggcgacacagggagactgtctcaaaacaaaacaagacttgaaacaggcatgagaggcagctatgtggctgtgagagggagagcattccaggcagagggaagggcaagtgcaaaggccctgaggcaggaatgtacttgctgggttaagagacagcaagggggctggcgtggctggagtgggattagtgggagagccaggagtggggggagggtggcgggcagggcaggagatgaggtctgagaaggagagtagtgagggaaggggctgattgtgccgggttgtgggggctacagtgggattttggcatttgctctgcgtgagctgggagttgtgggaggattctgagcagagagaaggggagtgttccactgtataacatgggttgagcttgtgttacggccaggaacacactccccctgcagtctctctcctcagtgctcccacccccctaccacattcactcacccacctttgcaccgaacccctatagggcgggcacgaggaccaggagatgggtgtatggggctctggggtctaggagagcctgagcagggatctgggggacctcagtggggaggggctccatccaaacctcaagccccctcctgctgatggccctctgttatcccggtgggtgcaccctctccactccaccaacagcccaggcatggccttaactgcccctgccccccgcccctgtctgcttcccaaacactgagccatgggctaaaaggaactggaggatggtggggggcagcgcttccctgtcctggcatgggccccaaccctggcctcccacctcactcacctgcagctcctggaacagcaggttggccacgacacggtggcagagccgggtcacatggtccagagcactagcagatgcttcccgggccggctcgctttctgggggccccacccgggccaggcgctcggccagagctctgtggggatcaacagagccaaaactgagggaccccaacatctcagcccaactgcctaggcctgtcttcccttaggtagatcagaggggcacaggggtgacaggtcagatggggggctgagaaaggtcagggactctggagaggggtcaggggatgcttgacaggttgggggtgtctggggattggggtgtctggggacgtcaggggactcatggatgttggggggctgagggatggctaggaggtctagggtatattgggggagggaaggggggtctctctgtgtcttcgggtctcagtttctcttggtgctttctgggtgagagtgtggaggcctccattctaaaagtctgtggttcttttttttttttttgagacggagtctcgctctgtcacccaggctgcagtgcagtggtgccatcttggctcactgtaagttccgcctcccaggttcatgccattctcctgcctcggccttccgagtagctgggactacaggcgcccaccaccacacccagctaattttttgtatttttagtagagatggggtttcaccgtgttagccaggatggtctcgatctcctgaccttgtgatccacctgccttggcctcccaaagtgctgggattacaggcatgagccgccgcacccggccaagtctggggttctaatggtctacagctctgaaactgtacccttactcttctctttttttttttttttttttgagacacagttttgctcttgttgcccaggctggagtgcagtggcgcgatcttggctcattgcaacctcaacctcccaggttcaagtgagtctcctgcctcagtctcccaagtagctgagactacaggcacccgccaccacacctggctaatttttgtatttttagtagagacaggttttcaccatgttggtcaggctggtcttgaactcctggcctcaagagatctgcccaccttggcctcccaaagtgtgggattataggcatgggccactgcatcctgccccggccatttattatgattactattatttgtaatacaaatggtagaatagtatacccacttctgccctttccttcaacagcttggagacttttccgttagggcatgaagagttctcacgctcctttttaacatctgaactggattccactgcttagctgtcctatcatttatttaactggccctcgatagatggacagttggttccattttttccagggaggaaccctgcacatatgtcatatcccatgagcttttggcctctgaagggtgcattcctagaggatctgctgggtcaagcgcccagtgtttgtgatttgggcagaaagtgcttggtctggactgttctccattcggcaatggaagaacacagactgctacaatgataggaaatgggaatggccaggcaaggtggctcatgcttgtaatgccagcattttgggaagctgaggcaggagcatcacttgagcctgggagtccgagaccagcctgggcaacatagagagacctccatctcttttattttcttttttttgagatggagtctcgctctgtcacccaggctgcagtgcagtgacgggatcttggctcactgcaacctccacctcccaggttcaagcgattctcctgcctcagcttcctgagtagctgggattacaggcacctgccatcatgcccagctaatttttgtatttttttagagatggggtttcaccatgttgaccaggctggtcttgaactcctgacctgagatgaactgctcgcctcggcctcccaaagtgctgggattacaggtgtgagccactgtgcccagctgactcccatctctttttttttttttttttttttttgagacggagtctcgctctgacgcccaggctggagtgtagtggcgcgatctcagctcgctgcaagctccgcctcccaggttcacgccattctcctgcctcagccttcggagtagctgggactacaggtgcccaccaccaagcccggctaatttttttgtattcttagtagagacaaggtttcactgtgttagccaggatggtctcgatctcctgacctcatgatctacccgcctcggcctcccaaagtgctgggattacgggtgtgagccacgatgcctggcccccatctctctctctttttttttagttaaactaatcaaaaaggataaaaaggcaaaaaaaaaatctgtcattcttttttttttgagacggagtcttgctctgtcttccaggctggagtgcagtggtgcgatcttggctcactgcaagctccgcctcccgggttctcaccattctcctgcctcagcctcccgagtagctgggactacaggtgcccgccaccatgcccggctaatttttttttgtattttttagtagagacggggtttcaccgtgttagccaggatggtctcgatctcctgacctcgtgacccgcctgcctcggcctcccaaagtgctgggattacaggcatgagccactgtgcccagccaaaatctatcattcttagagtcttgagtccggcgtctaggattctgtaattcgaacactccaatattcggatgctctgtggtgctatggctgtttcaaggactcccagattttatgcgtctaaggtcccatgctcagactcccctgagtcagttctgcaatccccacccaggatccgggcatcccaggtcagcttccaccttggattggtcctccctccatcacaccatggatgccctcacctcagtggggggccgcagttgaccagggcgatggtcttgctgatataggtgtcaggtagcatctcccggactgctgggttctcatggaatcgctccacacgctgctggaagctggtgggaggaaaggggacagatagggcgccactgggtcagggtccctcgtgggcacccagcctgccaaagccaccatccctgcggtggcactctacctgtcctcaggtgactccctctcatctctcctctctctattggatcccaggccctgatgcccaacccccagcagagctaacctgtgctcccaggttcccctacctctgcaggaactctgccagcccgcctaggcagcagtgggccatccgctccccaaactcctggctgatgcggggtgctcgctctgtgtgctcttccagcagctgtgaggtccagggcgacaagaagaggtgaggaggggcaaggtcccactttccatccagcccatcccccagcctccctccacctcctacctcacacacatcctgggccaggctgctgggctggtcctccaggctcccccagtgctcttcgtcctcctgcagcacacggagaagggcagcccgggtctgagcctacagtagggagaggggagacaggcaggagttgggggcggcctggaggtctttttttttatctctttctcccaccacaatcccctagcccttaaccccaagcagttctggattctacctatgagcttgtcaaggtgatgctggggagggaggctgagccagaaaacttctgcagcccttcccactcctaactctgtggtttggaacttcatattaaaagtctggtttggccaagcgcgatggctcacacatgtaatctctttgggaggctgaggttggcggatcacctaaggtcaacagttcaagaccagcctggccaacatggagaaaccccgtctctactaaaaatacaaaaattagctgggcgtggtggtgcgtgtctgtaatcccagctactcaggaggcagaggcaggagaattgcttcaacctgggagacagaggttgcagtgagtggagatcatgccattgcactcccgcctgggcaacagggtgagactccaactcaaaaataaaaataaaataggctgggcgcggtggctcacgcctgtaatcccagcactttgggaggtcgaggcgggtggatcacgaggtcaggagatggagaccatcctggctaacacggtgaaaccccgtctccactaaaaatacaaaaaattagccgggcgtggtggtgggcgcctgtagtcccagctactcaggaggctgaggcaggagaatggcgtgaacccgggagacggagcttgcagtgagccgagattgtgccactgcactccagcctgggcaacagagtgagactccatctcaaaaaaataaattaaaaaataataaataaatagataaaataaaattagtccatggttttaagcttcctccatctaataagcaagggcttaattgtgtgtgtgtgcacgtgtgtgtataattaaatatatacatatatttatgtattaaatatatacatatatttatgtattaaatatatacatatatttatgtattaaatatatacatatatttatgtattaaatatatacatatatttatgtattaaatatatacatatatttatgtattaaatatatgttatatatgtaatatatttatatattaaatattagtataagctatataatgtgtatattaataattcataatacgttatttatatattaataattagtatgtattatatactatagcacatgaaatatgtaatctatattaacatataaatattaaatataaatcaataatacatattataaataatatattataaataatatagatacatgtgaccaggtgcggtggcttatgcctgtaatcccagcactttgggaggccaagatgggcagatcacctgaggttgggagttcaagaccagcctgaacaacatgtagaaaccccttttctactaaaaatacaaaattagccgggcatggtggcgcatgcctgtaatcccagctacttgggaggctgaggcaggacaatcacttgaacccgggaggaggaggttgcggtgagccgagtttgtgccactgcactccagcctaggcaacaagagtgaaactccgtctcaaaatatatatatgtgtacattataaataaagctataatataatatattattgtatattatttataatatacacatttatatgttaatatgtatacacaaataatgtatacttaatatttatattaaatataaatcctattattacatattatgatatgtatgaagtattatttatattaaatattgtttttctttagaggccacgtcttgctctgtcccccaggctggtgtgcagtggtaccatcatggctcactgcagcctcacactcctggactcaatcctcccgcctcagattcttgagtagctgagactacaggcacgtgccaccacacccagctaacttttaaaatgttttacaaaacatttttgttttgttttgttttgtttttgagatggagtctcgctctgtcgcccaggctggagtgcagtggtgcgatctcggctcactgcaagctccgtctcccgggttcacgccattctcctgcctcagcctccagagtagctgggactataggcacccgccaccatgcccagctaattttttgtatttttactagagacggggtttcactgtgttagccaggatggtctcaatctcctgacctcgtgatccacccgcctcggcctcccaaagtgctgggattacaggcgtgagccactgtgcccggccacaaaagttttaaaacagagacagtcttgctatgttgtccaggctggtcttgaactcctggcctcaagaaatcctcccacctcagcctcccaaagtgctgggattacaggtgtgagccaccgcgcccggccaagggtctatgttttattgtcttttggtcccaagactctgctctcaggttctgccaaacagttagtttaagattctcagattctgtgtttcaagaactccaaaggctgggctgcaaaggttctcacatctctgattctctgatcaaatgtgttgtctcggctggggtgactcatgcttatactcctagagctttggaaggctgaggctggaggatcacttgaggccaggattttgagactagcctgggcaaaatggcaagaccctgtctctgcaaattttttttttttaaattatccaggcatggtggtgtgtgcctgtaatcccagctactcaggaggctgaggtgggaagatcccttgaacccaggagttcgaggctgtagtgagctgtaatcatgccactgcactccagcctgggcaaaagagggagacatctgtaattaaaaaaataaaaaagtataatcctcaatttgatgagtttaaggatccagatctcttttctatggttctaggctcttaagtagcattgactgatttctgtggctggaagtaggactggaattgagacagcaaacatcactgtagccggggacggcgtgcatggctgggccattctgctcagcggtgtctgtgcaggttcagtaattaaccatgtttattaccagccctgcttatatgtgaagatctttgtcagccaggcctgatggcacgtgcctatggtgccagctactggagaggctgaggcaggaggatcgcttgagtccaggaggtcaatgctccagcctggcaacagagcgagaccctgcctcaaaaaaaaaaaaaaaaaaaaaatctttgatgctatacttctgtgagtctttgggcctgtgagctgtagttctgtgactaactttcttgtactctaaggtttgaagtgtccagatatactgaacctttaccaagtgtctctgtacagcggcctttgtgtctatggcacatggatagaactcagaagttcgtaaagggaaaagggagttggaaagagtgaaaggtggaggggacaggcttcccaagcccactgtgaccccctccctccacagcacctcctgcttccaaaatgcaaagttccaggtaccttaacatctgtgacgcattcatcctccaaaccccgcagggtgccaggggagagaaggggccccagctccccattctccagggcggccatgtccaccagccctaggacctctctggggatgggggtgagagaaaaggaggtctgtgaaaagtggggctgggcagttggaaccttccccacaccctcctacccactgtttctgtgaccctgggccactcccttcctctctctaagtcatctctgctcatccctcagaggaagtctttggaattgttgcttccccggctccagctctctgagtcagctccctgatggatggtgtcccggcatgatatttaggggtcaagtccaggcttgaagatctgacatgcaaggcttcacccatgatccatttcaccagacagaagttccctttgcacctatgctctgaggccctgctgccttacctggccttggaggcttccccagtccagccctctctccccaccttctacgagcttacatgcctggagctatgtgatatcatcaatatccacccccaaacaccccagacttgggctcatggcatcctctcaattataaacaccattgccctacaaattggaccaaacccagttcccaccactttaggaagctttccggactccctatcctgcctccatcccttatagataacatgagagcattattgacatacattcccaaatgagatctatgtggtcaatgtgggtatctgttgccttcccagtcttccggtgacagcatcctgattttgttggaagaaccacccacccccttcactgtccaacgtgtggcttggatgtggctaactcccttttctctggggtagacaggtgacctggaggtggctaatcaccatagtccatcccccggccacaagaatgggtatgttttaggacacaaagtctcaacagtaataagattctaggactgagagggaccatggtactgaggttctgggtgctacccttatagaattcaaggggcaaacagcactcaagtcctaaaactggcccgggcatggtggctcacacctgtaatcgaagcactttgggaggccaaggtgggtggatcacttgaggtcaggagttcgacaccagcctggccaacatggtaaaaccccgcctctactaaaaatacaaaaaaattaggccgggcacagtggctcatgcgtgtaatcccaacactttgggagttcgaggcaagtggatcacctgaggttaggagttcaagaccagcctggccaacatggtgaaaccccgtctctactaaaaatacagaaattagctgtgcatgatggtgggcgcctgtaatcccagctactcgggaggctgaggcaggagaatcacttgaacccgggaggcggaggttgcagttggcagagattgcagcactgcactccagcttgggcgacagagcaagactccgtctcaaaataaataaataaataaataaataacgtcctaaaactagaaggatcaacagtgttgaggttctaagaccaaaagagggaatgaggctaaggtttaggattcaaagcttcattggtactaagcttctatggttgcaccatacattctaagttctaagattggaaacgtcaacagtactaatgccctaggctctaaagagaaagcagtgtaggattctagaattctaagtgtcattgtattaaggtgaagggtcagtggggctatggttctaggaaggaatggtcaacagtgctaaaactctaagactggaagggtgaacagctaagattctagtagcgtaagtgtcatgaagcccaggttcttggactggtgggcccaccgtgctgagctactaggattgaaactgtcgatagtgctaaaattgtagaactggaagagtcaatggtgccaataggttctaggtctgaaagggtgggaatgctaggattctaagactggaagcatcagtgttacttagatgctaggagtgtaactgtcgatgatgctaaggttgtatgtaggtctagaagaatgaatggtgttgagattttaggaacggaaaagtagcaacgcaaaggttctaggactagaggaatcaatggtgctaagattcggggactggaagggtggacagcgaggcgatctagagtgtaagtgttgacagagcgctgaggtttttggaccacagtggtgccggagctcttattctaggactgcaagcgtccatggtactaaggtgctggaaccggaagcctcggtagcagtgagagtctaggattgtaactgtcagcggtgctgacgactggatgggttaatggtgttaaagtgctaggactgtagggtcagctgtcccaaggtccttaaggtctgaagaagccagtgctagggggtagggctgagggtttcacgtgaccttgggcaactgagtccagcttacctggggtagacctgattgtgccagtgcagcagcgcgtagcggtcggccagcggcagcctgcgacgggcggaggcccccagccactcggccagggccccgtggtagccgcgcaggtagacgccgaaggcgcccaggccggcggggtaggcgggcgccaggcggccccgcaccacggccatatcctccagcagccgcgcccgcagcgcctccagctgcccggccaggcccccgggcgccccgggagccgctgcctctaggcgctcccgggccgcgcgcgccacggcttcggcccagcgtgcgcgtagtttgcgggccgccccgggaccccgacgcccgtcggccgcctcctcctgtaccagcacctggcccagctgcgccaccgcgccagccccggcgcacgctcccggcccggggcccgccagcgtctcgcgcaccagcgcccacagctcgcgctgcagggcctcgtacagcagcgccacgtcccgcgcccggcggcccccgccagcgccctcggccttgggaggcccaggcgcgccgcccctcgacggcgccagctcctcggcctctagctccaggatgtgctcgtccgcacgcgctagttcgcgctgctggatcaggctcaggatctccagcactgcgggagcaaagcgggaggtcagcagtgcgcgggggggaggagggcgatgccggacgcggggttgggggtgcttaggaaggggagagagatgaggggaaaagggttacaggaggcgggaaagtgtgggggcagagaagagcccggagaagagcaagaaagaaggatgttgagtgaaggatgtaggggaggggtcagggtgaggggctcatgcttgtaatcctagcactttgggaggccgaggccggcggatcacttgaggtcaggagttcaagaccagcctggccaacatggcaaaacctcgtctctactaaaaatacaaaaattagccaggcgtagtggcgtacacctataatcccagctactcgagaggcaggagaatcgcttgaacccggaaggcagaggttgcagtgagccgagatcgcgccactgcaccccagcctgggcaacatgttgagcgagactctatctcaaaaataaataaataaaaaagagagagggggaaaagaaaaatgcctgtgactgaggaggggatctggggaggttgcagggcggaaaaatggaggaggggtcggaggaggcgagaaggttgagagaggagccacgtaagggggagagagatggaggcagccggtgggagtaggaggggcagggtggtgacttggagatggggagaggatatgggaccactgatggggtctttttggggtggggatggctgtgggctgatctggccctctgatgagttcagactgcctcgagaaaggcgagtcgggctggaaggcctctgaggctgaaggagggtcctggcagcccagggttaccctcgacacctccacccccctccacttcctccctggcagagaaactatttcctggccagcgctatttctgcccatccgtttccagaaggcggggctctagtcaccccctcctcacctccctccagtgccctcccagtccccagggagctggggctgaaatagcctctggccagaacgtggagggcatcagaggacagaaaaggctctcctgaggtccccagccctggagcagttcgggcctcggggctaaaagccgggctcaggcacgggagcagagataaaggcagggttgggggtggcggtgaattaagatggggattgggacacggatggggatagggccggaggtgaggatggggtgaaggtgggggttgggatgagggagtttagggttaggatgaggtcaggtgggagtctggacagaaatgggaaagaggcaagaatgacattggggtctgggtagggatgaggttggagaggtgggggaggggaatgtaggtgaaagctgaggatggaaaggacataaagattgatgtgaaggccgagtgcggtggctcatgcctgtactcctagcactttggaaggtgggcggatcacctgaggtcaggagttcaagaccagactgaccaatatggtgaaacctggtctctactaaaaatacaaaaattagccaggcatggtggtgcattcctgtagtcccagctactcaggaggctgagacaggagaattgcttgaacccaggcggcgaaggctgcaatgaactgagatcttgccattgcactccagcctggatgacagagctagactccatctcaaaaaaaaaaaaaaaaaaaaaaaagattgatgtgagtttgaagatgaattgtggaagtgagttgggcttgggaataggaacatggatggaattgaaaatggaggttggggatgggggtttaggactgggactcaggataggggtgaagatagattagggatgaagaggaggttgcgtttggagttggaattgaaactgggggctgaggaagaactaggaactcaaataggactgaataaggaggttgatggccaggtgcggtgactcatgcttgtaatcccagcactttgggaggctgaggcgggtggatcacctgagatcaggagttcaagaccagcctggccaacatggcaaaaccccatctctacaaaaaatacaaaaaaaatttagccaggcatggatggtgatgcatgcctgtaatcccagctactcaggaggttgagacaggagaatcgcttgaacccaggaagcggaggttgcagtgagctgagattgtaccattgcactctagcctgggcaacagagtgagaccctgtctcaaaggaaaaaaaaaaaaaaaggaggtcgccagagggaaatgggtggaaggtgggtgctgagaggggcctggggttgggggttaagagtgagaccaaaagagtttaaaagggtggaaggtgaacatggggaagaatgggatatgaaacggggctggaccagttgggggttgccatggtgttggacatagacaatgacattaaagatggcgtttaggccaggcgcagtggctcatgcctgtcattccagcactttgagaagctgaggcaggaggattacttgaagccaggagttcaagaccaacttgagcaacatagcgagacccccatctctacaaaaaatgtgaaaattagccaggtgtgatcatatgtgcctgtagtcccagctactctggtggctaaggtgggaggattgcttgagcccaggaggtcagggctgcagagagccatgattgcaccactgcactctagcctctagcctgagtgatagagcgagaccttgtctccaaaactagatggcatttggaggaaaggatgagctgtacgagaagcatacggatgtgtctcagatagagactgatggtgggcttggaataagtgtggggtgagaacagaaaaggcactgaggaagacactggggcttggagtaggaatggggactgaggatgaagacagggtggtgttagggattgaattacgtccccccagaaaaaaaaaagatatgtgaagtcttcaccccagtacatcagaatgtcacctgatttggaaatagggtctttacagaggcaatcaaattaaagtgagatcatagggcagacccgaatcccatgtgagtggtgtcctcataaaaaggagaaattggccacacgccgtggctcaagcctgtaatcccaacattttgggaggacgaggcaggcagatcacttgaggtcaggagtttgagaccagcctggccaacatgatgaaaccttacctctactaaagtacaaaaattatccaggtggcacatgcctgtaatatcagctactcgggaggctgaggcaggagaattgtttgaaccccagaggcagaggatgcagtgagccaagattgcaccactgcactccagcctgggcgacagaggcaaaaaaataataataataaaataaataaaataaagaaattgaagaaattggggatagaaagagaagggggagagatgggaccaaaatcaggtattcccttggctttagacatgggagtagggctgaagacggcaggtggaggaggcaaagattgagggtgggcatatattaacaggtggcactgaagagaaaggttgacgacagggattaggactgcagtggtaatgggttggagctggcatggaggtgggagatgtgagttagacatgtgaattgcaggtcggggtcacaggtggtagctgggatgggcttaagtatgaagcctgggaccaccagggctggggatggacatgggcactgggattctcccaggacagggtcagggctccggactcacctgacaatggctccttcatctttgggggctctgggaccttgggtgggggctctggagctgcctcgcctgcaggcaccactctctcagccagggacgcacgctggggcttggatccacgccccagtctcaggaaggccagtctccgggcggcctcccccgctgcctcctcgtcgccgtgggctcgggtcccatgcagccgggccaggaggccaaaatctgctgagctcctgcgtatccctggtaccagcacacggcccaagaaagagcggggctgcccatccccagggctgcctgcccgccggcccggggcccagcccagccggaagggggccaggcccgcaagcttctccagggtggcgcggcggcgacaagatgttccattggggagggaccccagctccccggcctcttcttcctccagccctgaaacttcttcaaaggggttccgagaggacctcaggggcagggtccccgcccggggcaccttagggtctgacactcccagattcttcaggataggcattttgacaggtggggacctggggaaaaaaataatgaccatgggcgatgctgatgacaatggtggtatggatgacggtgcctctgtgtaccgagcactttggggtgagcgtaccagacacttgcctgagcacttaataagcccttgatctgcacaagcttataagatggggactttttttttttttttttttgagacggggtctcgctctgtcgcccaggctggagtgcagtggcacgatctcagctcactgcaagctccgcctcccgggttcacgcgattctcctgcctcagcctcctgagtagctgggactacaggcgcccaccaccacgcccggctaacttttgtatttttagtagagacggggtttcactgtgtgagccaagatggtctcgatctcctgactttgtgatccacctgcctcggcctcccaaagtgctgggattacaggcgtgagccaccgcgccttgcctcttttttttttttcttttgagatggagtctcactcactctgtcacccaggctggagtgcagtggcacgatctcggctcactgcaacctccgcctcccaggttcaagcaagtctcctgcctcagcctccggagtagctgggactacaggcgcgcgccaccacacaaggctaagttttatatttttagtagatatgtggtttcaccatgttggccaggctggtcttgaactcctgactcaggcgatccacctacttcagcctcccaaagtgctgggattacaagagtgagccacctctgctggcctggaatattctctatcttaagttgatcctcctactccgtggagaaacaggctgagaggggggaaggctccctcccaagatgacacagtcagtcaagggcagagatgatatggggactcaggccctaccatccacccagacgtccagggcagactcctgagcacctgcctacaccccctcatccccttcatttctcctgtttgatttgtacccttgtcatctctccctcattcatctcttcagcaaaaacttattgggaaatgtctagaataggcaaagcctaattttttttttttttttttttgagactgggactcaccctgtcacccaggctggagtgcaatggccccatcatagttcactgcagcctgaaactcctgggctcaaatgatcctcgtacctcagcctcctcagcagctgggactacaggtgtgtaccaccatgcccacttaattaattaattaatttatttatttatttattgagacagggtcttgctatgttgcccaggctggtctcaaactcctggcctcaagggatctatccacttctgcctcccaaagtgctgggattacaggtgcaaatcacctcgcaggtctctaggcaaatccttagagacagaaaggagactgacaataggactggagagaacggggaatggcgagtggctgctaatggatgcagggtttccttttggggaaaggaagacactctggaactagataaaggtgatggttgtacaacactgtgaatgcattaagtgccacttaattgtatgcttttaaaatggcttaaggccaggcgtggtcgctcatgcctgtaatcccagcactttgggaggtggaggcaggcagatcacctgaggtcaggagttcgagaccagcttggccaacatggtgaaaccccgtctctactaaaaataaaaaaagtaaaaaattagccgggcgtggtggcatgcacctgtaatcccagctactcgggaggctgaggcaggagaattgtttgaacccaggaggcagaagttgcggtgagctgagatcacaccaccgcattctggcctgggcaatagagcaagactcagtctcaaaaaataaaataaaacaaaacaacttactaggtattagccatgggcccagccctgtgcaggcgttagggacacagcagtggccagggcagcccccatccctgccattacagcttcctgagtcctgcccattccatctcctaagcctctcttcagtctgcgctccctcctttcactcacttcccatagcccctaccccaagcggaacccttgcccacttccctgccctggcctcctccctggtccccagcctctagtcttggcacctccagtccgcctttgaggaccttgaaaaagcgcaaaccaggccgggtgcagtggctcacgcctgtaatcccagcactttgggaggccgaggcgggcggatcacaaggtcaggagatcgagatcatggtgaaacctcgtctctactaaaaatacaaaaaattagctgggtgcagtggcaggcgcctgtagccccagctactcgggaggctgaggcaggagaatggcatgaacgcggaaggcggagattgcagtgagctgagatcgcgccactgcactccagcctgggcgacagagcaagactccatctcaaaaaaaaaaaaaaaaaaagaaaagaaaaagcacaaacctgctcttctccatctcctaagccttccatggctccctagtatcttcaggacaaagctgaggcctctcaccacagccttcatgctctggcagctgcacacgtcactagtgctgtcccgtagcctcctccttaccccaggaacctccaggtttcagcatctgctggtgcttctacatagacgcctgttctccatgctccagtcaggacttcaggactcacacttcaggactcagccccatgccccctcctccaggaagccctctgtgaccctcaggctcccagtccctgggttcccacacctcacctctgcctgctctgggtcatccctgtctggggacagatctgtgtcccttactggactgcaaacctcagcaggacagggctggggctgtctcagtcaccactgtgtccccagctcccagcacagggcagacactcagggaatgggtgctaaacaggaaatgaaggaaggaaagtggcaagacagttcattccttgtgtggggaggaggagggtgagtcgagctggaagaggtcactagggagcaggccacgcagggctttaagttccttgataagggacaggctttcttccaagagccctgcagagccacagataggtgctttttaaaacaatgaaatagttcaaacattcggaaaagtacagaagacaagcttaataaacacttctgtgcctacaatcctagccacagctcacacaatcatttgctctcttagttcaggtttttgttgttgcttttgtctttagagacaggatctcactctgttgcccaggctggagtgcagaggcgtgatcatggctggctgcagccttgaactcctgggctcaagcgatcctcccacctcagcctcccaagcaacggggacatcctgctaattttattgtttaattttttgttatagatggggtctcgctatattgcccatgctggtctggaactcctgctcctggcctcaagcaatcctccctcctcggcctcccaaagtactagaattacaggcgtgagccaccatccactgccctgatttttgttttaaagaacaagccaggcgcagtggctcacgcctataatcccagcactttgggaggccgaggagggaggatcacctgaggtcaggagtttgagacaaacctggcaaacatggtgaaaccctgcctctactaaaaacacaaaaattagctgggtgtggtggcgggtgcctgtagtcctagctacttgggaggttgaggcaggagaatcacttgaacccaggaggcggatgctgcagtgagcccagactgtgccactgcactccagcctaggcaacagagcgaaactccatctcaaaaaaaaaaaaaaaaaaaaagaattacaaatgcgtgcagcctcctcctgccacctctcctggtcccactcgctctggccttctcctaaggaatccagcatccagaatgaatgtgctgtttacccgtccaagtagatttttatcccatgctccatagacttgtatccagaaataatatactgttctacatggtttcaaactctctataaatggtatcatactatttgtatcttgcaacttgctttaaaatttatttttttgctcacgttatgaacttgtgagaatttatccatgtctagccatacagctccagttcatttaagtgctatgtaatattccactatatgaattgtgtaaagggtcagatgttcacttgttcttctattgctggacgtgtagcttgtttgtcaccacgacagggttctgagcaggtcaggacagggtcaggattatgcagacgtgcgggggtggacaggaggcctgggaagagggtggtgtgcaaaaggcctgggttgcctaggttatgagtaagagcacccctttccatgatggggaggccccttctttctttccctgtttcaacccctgagctgctgcttctcaaccctccagttcctagaaacgctctcggacctccttccggtctccatgggcccccgcccccacaggaggcagtcaccatgacgaccccttgcctggagcccccatggctgtgtgcaatagatactcccccatgcacacacattatttgcacactcatttctcttctattttattttattttttcagatggagtctcgctctgtcacccaggctggagtgcaatggcgcgatttcagctcactgcacctccacctccagggttcaagcgatttctcctgcctcagcctcccaagtagctgggactacaggtgcccaccaccacgcctggctaatttttgtatttttagtacagatggggtttcaccatattggccaggctggtctcgaactcctgaccttgtgatccgcctgtttcagcctcccaaagtgctgggattacaggtgtgagccaccgcactctgtccttctcttttattttttagacagtctcactctgtcacccaggttggagtgcagtggcatggtctcggctcactgcaacctctgcttcccaggctcaagcaatcctcccacctcaacctcccgagtagctgggagtacaagtgcaagtcaccacacctggctaatttttgtatttttagtagagatgaggtttcgccctgttgcccaggttggtcaactcctgagttcaagcgatccacctgccccagcctcccaaagtgctgggattacagtcatgagccaccacacccagccttgatttctctttcatcctctgaactggcatccacatgcctcatcccaaaatggctccatcatcccccctccaccccataactgtctccatcttcctctcaaaatttcaggctcgaatttccctccaattgaagtcaaccttgcccggactacatctgactttcccccacctggcttcaatatcgcctccaaactggatccaacatccccaaacctggctgcaacattttcccaaaactgtctccgacgtctttccccttcctggctccaacacccgcctctgcaaactggtgctgacatcctgccccctccaaccctctgtctgcctcccagtgcccagcccctgactcacttccgaggcatccctcaagcccccagcctctcaggcccgcaggatgtcttggccaccagagcttccctctttgagcccctcctcctcttcctcactgccagccttttccccggagtccctaaccttctgcagcggccctgacctcggtttgcggaatccatcacctccaacgctcagcatctgtattagagaacggtctttccatatggcatgtccccaagcccaaccccaaccagtgcaaccccaatctagtccttgaccccaaacacaatcctgtcatcagcccagaccactgcaagctcatccacatctccaatcccaacctgatctcggtctctcctgcttgatctcaatccctacctggtccctgtctcccatctccgagaccccatctcttgggatagaacaaatacccgatccttcctggcctcagtcttcccgcccagactcgcaggacattcgacccaatgtcatctcatctctattctcctttggtggcaccaaggtttctaatgctcccttgcaccctttgtggaccccgcgagtcctcaaattctcccctgcaccctcctctcattttcatctcctttctgccttctcgccagcacccctctggagtcaggccccagattctctctttgcccccagcctctgctgggttcaaggtacaggttctcatcagctctggtccagtgcaactaagggcaactgttttcccagttgccctggggaagggggaccccttccccctgtccccagcacactcacctctgtcctcctgcccgtccttctgttcccgctgctgtcctgtccccaggctacttcagccaggactgctgggagcttggatctgagttgggggggtgctcggaggaggacaatttcctgtcaggaaacccctccctctctggggccaggggcgggaaggactcattatctgtctgcccttttaggccaggctgcggttgggctgggaaggccgaggcccacagctgggcccccaccctcacccccgctccaggccggaatccgcccactcctgcatgctcttcacgcctcccaaggtgacaacaccatcctgggcgccccggggagacaccccaagctggacgccagcccagagctgctctccagcatgggcaagccccgaggccttagaatgagaaccggggggcaggcacgcatctctctagagttccctgccacgggctgaagaccaggagggaagttttgctgggcccaggggctggggagggggacctatggaggagggcactggacatggctttggaattgtggttctctttgtctagaagcccctgtacccaggtctctgcatgaggccctccttttcatcatcccagttccagccccacagtctcttcctctgttctccactgtcccgtctcacagagtcgtcactctgctttgtcaatttatttttctttttttttttcctgagacagagtcttgctctgttgcccaggctggagtgcagtggcgtaacaatagcttactgcagcctggatctcccagactcaagagatcctcccacctcagcttcctgagtagctgggactacaggcatgcaccaccatgcccagctaatttttgtattttttgtagagacacgggtctcattaggttctccaggctggtctcaaactcctggcctcaagccatcctcctgcctcggcttcccaaagtgctgggattacaggcgtaagccactgtgcccagcctgtcaatttctttattgcaccttctacaatctgaaattatcagatgcaactggattccttgcagataaactcagcaaagctcactttgttgatcctgttcatctttataagcctagctgcgtgcctggccctcagtagtcaagatttaaatgaatttaaatgaagctgagggttggaggtgggtttggagatggacttcctgctagagttgggatgccaagtgaagtgagggctggggctggagctggtgctgggtggggttgggtatgagagtcagggttactttaaaaggctagggccatgtgtggtggctcatgcctgtaattccagcactttgggagccaaggcagggggattgcttgagcccaggagatcaagaccagcctgataatatagcaagaccccgtctctacaaaaaaaaaaatttttttaattagccaagtgtggtggcacgctgtagtcctagttactaagggagctgaagtgggaggatcacttgatcctgggaggtggaggctgcagtgagccatgatctcgccactgcgctccagcctgggtgacagagagagaccctgtctcaaaaattaagaaaaaaaaaattttttttaaataaataaaactgggctggttgcagtggcttatgcctataatcccagcactttgggaggccaaggtgggtggatcgcttgaggtcagaagtttgagaccagcctggccaaactgatgaaaccctgcctctactaaaaacacaaaaattagccaggtgtggtggtgcatacctgtaatcccagctactcgggaggctgagacggaagaaatcgattgaacccaggaggcagaggttgcggtgagccgagattgtgccactgcactctccggcctgtgagacagagtgagactccatctcaaataaacaaacaaacaaataaataaataagataaactgtgttcaagtgctcaggcacagcctgagggggatgcgtgatcactggcctaggcaaagtccaggctgggatcagggttggggtcaacattaggatcgggggctgggcttagggatcacagctccctcctggatccaagggttaagattcaaaggtctgaatgccccagttgaaggaatgaattcaccagacataggttgtggaggaagggctagctggatgaccaggtcgggaggcagaggaacaggccttgccccccagctcggcctctgcaccgcggacccatggtcagcagtggcccatcatgtactgggatcgtgcaggatttccaccccgccttatttatttatttatttatttatttatttagagacggagtcttgctctgtcgccaggctggagtgcagtggcgtgatctctgctcactgcaacctccgcctcctgggttcaagcaattcttctgcctcagcctcccgagtagctgggacgcaggcgcttgccacctgcaagcgcccggctaattttttgtattttttttagtagagacaggttttcactgtgttagccaggatgatctcgatctcctgacctcgtgatctgcccgcctcggcctcccaaagggctgggattacaggcgtgagccaccgtgcccgtccccctcctttttaaaaattattttttttattttgatttagagacagggtctcactatgttgcccaggctggtctcgaactcctgggctcaagtgatcctcccgttctggcctcccaaagtacggggattacaggtgtgagtcaccgcgtccagccccctttttaaattttattattattttttattgaaatacaattcacatacataagagtcacccttttcaaacagagtccggtaggttttagtatattcacaaggttgcagcaagcgtcaccactatttaattccagaacattctcatcaccccaaaaagaaacctggtacccatcagcagtcatttctcattccccagcctccaacccctggcaaccattaatctactttctgtctatggatttgccaattctgaatatttcatatgaatggaagcatacagtaagtggtcttttgcgtctgacttctttcgctaaacatgctgttttctttttttcttttttgagacggattctcactctgccgcccaggctggagtgcagtggcgcgatctcagctcactgccagctccgcttcccgggttcacgccattctcctgcctcagcctcctgagtagctgggactacaggcgcccgccaccgcgcccggctaattttttgtatttttagtagagacggggtttcaccgtggtctcgatctcctgacctcgtgatccgcccgcctcggcctcccaaagtgctgggattacaggcgtgagccaccgcgcccggccacatgctgttttcaaggttcatccactttgcagcctccctctctgtaagcctcggtccccccacatctgggaaatggggtggggacgctgttggggaagggagggcaggggtggaccctggagtgtgtggggcgcgtgtagggaggtgatcggctgcccccgtgtggtgcacggtagaactgcagctctcagcgccaatgcagggaacgggttgggggcgctcagcccctctagcctacccccaagacccccactttcaccctgcggcgtccctgggatcacagtacgtctagaacactaccccggaactccaccctctctgccactgtccctgaggctcctcgggccatatttgccaaatagtaataataatgtccccacatatgaattttgaatctggtcccctgtgaagcactttactcaaagattctcatttatttgttagcagtaacattaaaataacaaataaatataaacaaattgacaaataaaaatagtagcagcctgaggttgctgctattatttttcggagacaggaaaccacagtggttgagagagggtccaagttctggaacttgggagcacttggattcaaattgtagccctgccactaatttgccgtgtgaccttcagcgtgtgacgtttctcccttccttgggcctctgtttcctcatctgcaaatgggattgataaagatgctccctacctcttggggtggcagaaaggagaaactgctcagagcctggcacaagggcaactgccatgagtctgtgttgctcatagtatcaagcagtgctgtgctttcacaaccagcttttggctgagtgcagggtagtcccagcactttaggaggccgaagtgggaggatcgcctgagcctgagagttggagatcagcctgggcaatatggctacaaaaaattagctgggcgtggtggtgcacacctgtagtcccagtgacttggtggggctgagctgggaggattgcttgagccggggatgtccaggctgcggtgagccataatcgtgccactgcactctagcctgggtaatgcagtgagaccctgtctcaaaaacaaaacaaagcaaagcaaaacaaaacacccccagctctctgcaggtgggggtgtggagccttaatttgtagcatttgccaatttccatggtgtaaatattcccaccatggctaatttcaagctaccaaggtgatatcacatggcatttttgccccccattatatagtaattttactgtgcagctacaatagacgtaggtaacctcaagatcacagataatggcaaatgtagtaagataactaggacgtgatgagtatgtattacttgtacctttaatgtaatttaattgtatgtttgcataatttaatttttaataatggctgtgtttaacaaccagttccaaaattcctgagacataacaatcagctcgctccagccagatccagcacactgctgttttagaaggggaaactgaggctcaggaaaataagcctcagatagaagaaggcagggcacagaccccttcccaaaaccatgtgactcccaggccaagactatgtaatgcctgtctttctttcatcccaccctggtccacagagcatggatggtccccacagcgctgtgtggcctccgagaggctcttgtcctctctggtctcagcctgcccgcatggggagtggctgtgccctgcaggcgaatacctgcacagggttccttcgcacctgccagtgagcaacacacggattcttcctttcactttacaaactgggaaagtgaagcccagaaagggcaagtgcttgccccgggtcatacaggtggacagagagggtccccacaccccagctggggtgcaaaggagtggatgctgcagccccaacctgcgggtctggatctatgtggctgagtggaggcagcctgactagggaggtcactgagccctcagcagtggccaagccccgcacaccatccccttcacccaccccacccttaggcctccgaggggagagcttcccccgctcccccccgccaactggggagagaatgggccagggggagggacaatgtgggcagcgcctctggggtcttctctggctcagtccctttatctctatctcttcacagatctctgcgtctctgtatctctttgtctctccctgtgtgtgtgtggggtctctctcagtctttgtccctctgcgtctctgggtctctctgtctctgtctccctgcgtctctctctctctgtcatctggctcttccttcatctccttgcgcctctccacccttttgtaactcgtctctctctcttcgtgtctctctatctctacgtctctcgatctctctctctgcgtctctggcgctctgccccggcctctctctccccttctctcctctccagtgcgcctctcgtctcgggcgagaacacgctccccgccggcgtgcccagacccgcctccgcccccggagcccccggagcccccggcgccccgaccagcccgggcctgcgcctttaagggccggcggcggggggcggggtcccggcgccccgccctgcccgcccctccccctgacgtcccttcctccctccccagcccctccaccgcctccctccgccgccgcttgggccggctccgcgccccctccgcggcccccgcccgcccgcctgcccgccgcccccatggcgcccggggtccccgctgcacggggccactaggaccctcggcgtcccttcccctcccccgccctgccccctctcccgccgcgcggacccgggcgttctcggcgcccagcttttgagctcgcgtccccaggccggcggggggggaggggaagagaggggaccctgggacccccgccccccccacccggccgcccctgccccccgggacccggagaagatgtcttcgcggacggtgctggccccgggcaacgatcggaactcggacacggtgagtggggcccggccccttggggagccctggctgggtccagccgccaaacccttctccccgttgtacccctcgccccgcgagcccctaccctcgtttcctgggcccgacccggctcgtcacctctcgacccctcccggacttccaggcctctccaccctccccaccttttccagcccagcccgacccctgggggcgcccctctctcgggacccctctcttgtccccgtgcagaccgcttccgctcgggtctgttccctccaggaagccccttcccctgcttccaggagcccctcccttctcttgcctgtgctaagccgtttcccctccaggccgtccgcgtccgacacctcgccccctcccggatttgcagggcccctgaccccccaaggcccggccctggcactctcagcagggcctggcccagtcctgcctctggctccggccttccctgtctggggctgggtgccggctccccaggagcccccctcctcttattcccagccctctgcccctccaggacgcacccagggcgcctgtgggcagcccctggcaggaagctggtttccacctctcctgggccccggcccttttctggcttcttcaaggtctctcccgtcccaggcctggtccccatcttccaagcagccctgtccctagatcccagcaccccggggcccccagatgccacctggaccctttctggtctcttcctctcccaggaagccttggcctccaacttctaggccctcacctcacccaggctggtatttctaggccctggaccagtctgactccaggcctcatccgccctctatcaacttctcagcttcaggcagccccttccccaacccccaacctctggaccccctgctaggccaaactcagaccccttccccacaaaccaccgtcctttctcctgccccagggcctcccccttccttgctgggagtctggccttccaaggaagccccctcctcagcttcagaggccttcctcagctacagggcctggccccagatccttcttccagaaaactcctggacctgaagcctctcgtcttgccctggtttcaagcccttttcccttgggtcaatctgctggaagctttctccccaaatttctagaccccttgaccttccccagggctcagcctttattcatctgggctgctccttgcccaagaagttcctaccccatacttccaggccccccagacccttctctggtttcaaggacttctcctagaagcccccttctctgattcctaggagcttccccaagacccagggattcctggcctctgacttccactgcccccatggctttgtcactttccaccattcccaggcgccccctgcccctacactgcttcccagagaggcccctccccatctcctgtgtctctgatcactgatcacttccaaagacctgcccaccacccaatcctagacttctccccacctgggatctttgtggctttctccaaatccttctgccaggtccctgttccccttccccctgtttccctcacctccgacagacccccccacacacacacaccatcagagagatttatatctgtcccttcctcatcttgcagatccctccctcacagagaccaccccgcatcatcactatgggccagaactccaatttggagtctaatgaaatgcctaccacctctgttccttggtcactacaatctacagtgaggtgccaggggctccacagtcctgggttccaatgctgacatggccagctggtttgccttgtgtcctcagacaaccagttctccctttctgagcctcagtttcctgccctggaaaataggggtgaccgcttgagtgcctccaaggcttactcgattcaggcgaaggctggcacctaggaagcactccacaaatgccagctgctattgtggctgtgggtatgagtcagacagcccgtggattctcagctcagggctgttattggttgttgagtgagcctgcagattcactcccagcttgcagcctcagtttccttatctctaaatcgggttgatgatggccccccactgttagggatgtttgcaggagccagcgacgtgatgtgactaaggtgcacagggcctggcatgtgtcgtggctgttgtggttattagcactactttaattgttcagataaacttgggttcacatcctgtttctgtccctccctagctgtgtgacctcgggcaagtaaccttacctctctgagccttggtttccttgtctgttaagtggaacgcctaatgaagacttgctgttccctgggttgttaagatgcgtgcatggtgcggatttgaggatggctaatccccttttctctcctccaactcttgtcactaagacctgcctgtcagtcctggtggggagtcacttgcctgcctctggaatgggaggttgcagccccctctcctgttacctggttaccatggctacagccacgtggggtcatgctcccccaccccaagttccagggccccccaccagggggccagcctccccaggttccctagcaacagtcccgggtgttggggcgccagccgggcgggagggagccaggccagctggtggtgcaggccaattttagctcccacccccggcccccaggggctttgtcacccactgccccagctgcccctcgcaggggtccctcagccatgctgccttcagcgtggtgccatcccacctccagctggctgccctggcgccacctgacagggcttcttctccaggtccttatcttggtggggatcggaggccttatctccaggatctccacctgcctccctggtctctcctgggaagaagcctgggcctgtggggaagcctggctcagcactcaggaggaatcagcaggccggggttcgcatcccagcactctgctccatctgccctgtgaccttgggggagggactccccctgcctgagcctgggtgtccccgtctgaagactgcagatcataattggacccacattggaggccagggtgagggcacggcaggcagtggcggacgcgtggttagagccctggccgtggtggttggaactgcccagctgtggggaggttgtctttctgcccctgtgaatggactgtgtgaccttcacatggcaccttccctctccaaggctcagtttctctgctggaacatggagtcattccctgggctactgcaggaattaagtgtaggcgagttacctgtttacacaggacttggtccatagcatgagctgctttgtagaaatggttcatgacccagcgtggtagctcacacctataatcccagaactttgggagacccaggcaggaggatggcttgagcctgggagctgaagactagcccggacaacatagcaagactccatctctacaaaaaaatttaaaaatcagctgtgtgtggtggtgcactcctgtggtcccagctactcaggagcctgagatgggaggatttgcttgaacccaggcagttgaggctccagtgagccttgattacaccactgcacttcagcctgggtaacagagcaaggccctgtctcaaaaaaaaaaaaaaggttcaggtgtgagaggcagtgtggtattgtgacagagaagagcatcaagtctggtggaaactatcgggcacggtggctcatgcctgtaatcccagcactttgggaggccgaggtgggcagatcacctgaggtcaggagttcaagaccagcctggccaacatggtgaaaccccctctttactaaaaatacaaaaattagacggttgtggtggcgggcgtctgtaatcccagccactcgggaggctgaggcaggagaattgcttgaacccaggaggtggaggttgcagtgagttgagatcgtgccattgcactccagcctgggcaacaagagtgaaactctgccaaaaaaaaaaaaaaaaaaaaaaaatactggtggaaactgtttgggttcagatcgtgggtccgggtctcactttccccacctgtaaaatggagataatagtgtggtaatggcctcatattgcatcaatgaccagcattaattaaacgttagttgtcgttgctatcaagtggcccggcagtgtctttctcagagacttgggcccccagcccatcagcctcttggcctttcttcctcccctcctgttgtcctcctgcttcccactcccagccggaagggcacaggcagaactgccttggcgggaggcctcaggcaccctgagccccagccctgaaagggagacagtccctggggcttccaatcaggccagggcagctcagagcaggcaggtgacctgcgggggagagaggccagggagggacaggacagtaggaacagaacatcaggaggagagaagccatggtgtgggagacagcaagtcagggcgcttctcaagccctgggtgtttcagggggtggcagaagcaacagtgtttcccatggaaggaggataacagggattcaaccaggtctcagggccagtgaaagacttggttaccctgcagggggtggtggctcaggcctgtaatgccagcactttgggaggccgaggtgggtggatcacctgaggtcaggagttcaagaccaacctggccaacatgatgaaacctcgtctctactaaaaatacaaaattaaccaggtgtggtggcacatgcctgtaatcccagctactcgggaaagctgaggcaggagaatcgcttgaacccaggaggcagaggttgcagtgagccagactgggccactgcactccagcttgggcaacaagagtgaaactctgtgtcaaaaagaaaaaaaataagacttggttacaatgtttggagtccaatctggggtaacagtgattggaatcaaatgttaggggcattccactgggaatcaaatgttgacatttgggtttgaagtagaatttgggggctggagaggggacagttgatgggtaaaatagcaagtcaggaccagtggtggtggaggaggagcctcgagtccagattgaggtcagcgttgattggggttgagggcagcctcatttagggcaaaatattgtagagttgatccaggctccaggacaggcatatcctgctttttcgcactttgccttattgagcttcacagatacagtgttttctacaaattgaaggtttctgacgaccctgtgttgagcaagcctgtaggctccatttttccaacagcctgtgcacaatttgtgtctctgtcacattttggtaattcacacagtatttcaaactttttcatcattattataatagctgttatggtgatctgatatcagtgatgtttttcctcttttttttttagagacagggtcttgctctgttgcccaggctggagtgcagtggcatgatcatagctcactgcagccttaacctcctggggctcaagcgatcttcccatctcagccccctgagtagctgggactataggcatatgccaccatgcctagctaattttttttttttaagtttttctagagatgggtgtctcgcttcattgcccaggctggtctcaaactccctggcttcaagcgatcctcccgccttgtcaatgattttgttttattgtgattcactgaaggttcagatgattgttagcatcttttaacaagaaagtattataaaattaaagtatgtacattgtttttatagctgtaatgctattattgcacactcagtagactgcagtatgatgtaaacacaatttttctttctcttttttttttttttttttgagatggagtcccactctgtcacccagactgtagtgcagtggcgcgatctcagctcactgcaacctctgcctccctggttcaagtgattctcctgcctcagcctcctgagtagctgggattacaggtgcgcgtcaccatgtccggctaatttttgtatttttagtagagacggggtttccccgtgttggccaggcaagtttcacactctgacctcaggtgatccacctgccttggcctcccaaagtgctgggattacaggcgtgagccacctcgcctggcccataatattttttttttttttttttgagacagagtctcgctctgtcacccaggctggagtgcagcggcgcgatctcggctcactgcaagctccacctcctgggttcatgccattctcctgcctcagcctcccaagtagctgggactacaggcgcatactgccacgcctggctaattttttgtatttttagtagagatggggtttcaccttgttagccaggatggtctcaatctcctgacctcgtgatctgcccgcctcggcctcccaaagtgctggaattacaggtgtgagccaccatgcctggccttttttttttttttttagaccaagtctcactctatcactctggctagagtgcagtagagcgatctcggctcactacaacctctgcctcccaggttcaagtgattctcctgcctcagcctccagagtagctgggattacaggcgtgtgccaatgcctggctaatttttgtatttttttagtagagatggggttttcaccatattggccaggctggtctcgaactcctgacctcatgatccacccacctcagcctcccaaagtgctgggattacaggcctgagccactgcacctggccacctggcccataatttttatatgcactgggaatccaaaagattcatgtgcattgcttttttgcagtatttgctttattgcggtggtctggaaccaaacttgcgatatctctgaggtatgtgtgtaattagaaaaggaggttggggctggatgcggtggctcacatctgtaatccgtacagccgaggcaggtggatcacctgagtcaggggtttgagaccagcttagtcaacatggtgaaaccccgtctctactaaaaatacagaaattagccaggcatgatggtgcacgcctgtaatcccagctgctcgggaggctgaggcaggaaaatggcttgaacccgggaggcagaggttgcagtgagctgagatcgtgccactgcactccagcctgggtgacagaggaagactccatccgaaggaaaaaaaaaaagacaaggaggttgggggtagtcagactgcagtgagggttgaagaaggggtgtgatgcctggggccctgaatgttgcagatttggaggacatgggggcttttgttcctggaggcgtctttttgtagagaaagatgaaggatgcttggctctctggggcctgagtttgaaaagggccacggaggggccggtagccaggcctcaagttaagtgcactagcccacgggttccacggaaggtgggattggatagctcatgctccatctcccccgcccagcatggcaccttgggcagtggccgctcctcggacaaaggcccgtcctggtccagccgctcactgggtgcccgttgccggaactccatcgcctcctgtcccgaggagcagccccacgtgggcaactaccgcctgctgaggaccattgggaagggcaactttgccaaagtcaagctggctcggcacatcctcactggtcgggaggtgagtatgggcacagggtggggctcggggcaggtccctgtgggaccaggtcttcggtgtatgttgatagaggtcaggattggccctgggtttgctttgtggcctcaggtaagttcccgactctctatgggacaggtcacaatatctctgatgttcccagaaccacccccatgggaaaagagaactaatttcatgtatccctgaaattgccgggaaatctcagatcacaggcagtccaatgtgtgcgttgctaaggatgcatgtggcttttgtagataaacctgagctgtggccggatgcattggctcacacgtgtaatcccagcactttgaaaggccaaggcaggaggattccttgagctcaggagtttgagaccagcctgggcaacatagcaacactttgtctccactaaaaaataagtaaaattttttaaaaattagctgggtgcggtggtgtgtgcctgtggtcccagctacttgggaggctgaggcgggaggatcgcttgagctcaggagtttgaggctgcggtgaggtgtgacctcaccactgcactccagcctgggtaacagagtgagaccctatctcaaaaaataaaaataaaataaaataaaagagggctgggcatggtggcttacgcctgtaatcccagtactttgggaagctgaggcaggtggattgcttgaggtcaggagttcgagaccagcctgaccaacatgatgaaaccctgtctctattaaaaatacaaaaattagctgggcgtggtggcacatgcctataatctcagctgctcagtaggctgagccaggagaatcgcttgaacccaggaggcggaggtttcagtgagccgagatcatgccactgcactccagcctgggtgacagagtgagactctgtctcaaaaaaataaaaaaattaaaaggccgtgcgcggtggctcactcctatagtcccagcactttgggaggccaaggcaagtggatcacctgaggtcaggagttcaagaccagcctggccaacatggtaaaaccccgtctctactaaaaatataaagattagcttggtgtgatagcaggcacctgtaatttcagctacttgggaggctgaggcaggagaattgcttgagcccaggaggcagaggttgcaatgagccaagatggtgccactgtattccgcctgggcaacaagaccgagactttgtctcaaaaaaaaaaaaaaaaaattggccgagtgcagtggctcataccaacaaacacagcgctttgggaggccgaggcaggtggatcacctgaggtcaggagttcgagaccagcctggccaacatggcaaaaccccatctttactgaaaaaaaaatacaaaaattagctgggtgtggtggtgcgtgcctgtaagcccagctacctggaaggctgaggcaggagaatcactggaacccaggaggcgaaggccgcagtgagccgagattgtgccactgcactccagcctgggtgacagagcaagaccatctcaaaaaataaataaataaataaataaatagtaaataaattaaaaataaaaaataaataaacctgagctgcctctctgttttaagggtggactttggttccttgaaatcttcctgtgatctggagaacacagcaggtttatttatgttgtattctcagttacacacagcctcactctccccaccacctcttccagagcaggcatctgtgctgagtatggtgacattattgcaaaaagggcccacacaggctttgcagcctagatatgaggtctctaactcacttagaggaaaaggaatggtgggtgatttcatgatttccccacccctccttcaacttcagagaaatgattggaatgaattatcctgccttggatggactctcccctgccctcacgctgtctacaccatacacgcaaaagacaccgggccccgatggtcttacaggcaaatcctaccagatgttcacattttatgccagttcttccagagactaaagaaagaactgccactgcctgactgatttttacgcgctagtttgtccttaagagcaaaaccagacaagaaacaaaattacaggccaatctggtgaacataggtataaaaatcttatacaaaatattaacaaacagaacctggcaaatcaattaaagaaagctgtgtgatgacgaaactggctttatctcaggaatgcaaagttcttttccctttgacaatttattcatgtacttcaccacattctcagattaaagaagagaaaccatatgatcgtctcaatactggcataaaaagtgtttgataaaatttttaaaaacacattcgtgagaatatgaggaaagctaaggggctctctcttccatgaagaacacatggttccctatatgtggatctggttccaggggtttctgagagggacctggccccatctctgttttaaaaataaaataaaagttttactgcagactgggtgcggtggctcatgcctgtaatcccagcaccttgggaggctcaggcaggcggatcacctgatgttgggcgttcaagaccagcttggccaacatggagaaaccccgtctctactaaaaatacaaaattagccaggcatggtgacgcatgcctgtaatcccagatattcgggaggctgaggcaggagaatcccttgaacctgagaggtggaggtcgcggtgagccaagattgcgccattgcactccagcctgagcaacaagagggaaactctgtctcaaaaaaaaaaaaagtttcactgcaaaagaagtataaggagagttcaatgacattctgatttcctccccatgatgtatctcaaagctgttttaaaagttgtgtttaagaggtagattccatcaggctgcataagttcaaatctgggccacaacttactacaatttactagccatgtaactttggccaaatgactaaacagctctgtgcctcagtttccctgttggtaaaatgatgataatcctgttagccaaatgttggtggcatgtgcctgtggtcccagctacttgggaggctgaggtgggaggatcacttgagcccaggaggtcaaggttgcagtgagctatgatcacaccactgtaacaccactgtactctagcctgggagacacagcgagactctgcctccaaaagaaaagggggcgggggggtggggtgggtgcggagaatgggagggataatcctagcacttatctcacaggttgttgtgaagattaagagttctcgtttgtaaagcgcatagtccttgtagtgagggcttagtgcatgttaaccagttgttatttattccactgttcatttgttcaaaacaaagatgtgatgggccagtgatcttcattgccctcacaaagggatcccctcaaggtctcgtccatgcccacatccactcaggcagctctggagcagcgtcagccaggccctgctgtggaataaggatatttctctgcagaagtgagggtggcagtggagacagtgaggacagcttgtgcaaaggccctgaggccctgagttccccatccacagggtatggcccagagtgagggctcttctgggagagggggcaaaggaaggatatcccagggtgatctgagctgggccagctggagtgcagtgacgtcatcttggctcactgcaacctctgcctcccaggctcaagcgattcttccaactcagcctccagagtagctgggattacaggtgcctgctaccacacctggctaatttttgtatttttagtaaagacagggtttcgtcgtgttgaccaggctggtctcgaactcctggcctcaagtgatcctcccgccttggtcttcccaaaatgctgggattacaggcctgagccaccatatccagtggggcttgtggcaccttgaccgtccctcctcctttcctccccctctaggttgccatcaagattatcgacaaaacccagctgaatcccagcagcctgcagaaggtgaggctggggagacgggggagagcaggagccaggcttccggcacagccgggtgacccacctgacccttcctgcgggggcccggctggggaaaggatcccccaagccacccaccctcactctcctctgtcttcctttctggccacgcccagctgttccgagaagtccgcatcatgaagggcctaaaccaccccaacatcggtgaggagggaatgggagcaggggcaggccaccaactggaacacttgcaaaggagttgggggtggtggcagtggttagaatagttggagacccaccaggcgcagtggctcactcctgtaatcccagcacttagggaggccgaggcgggtggatcacttgaggtcaggagttcgacaccagtctgaccaacatggtgaaactctgtctctactgaaaatacaaaaattagcagggcatggtggcgggcgcctgtaatcccagctactcgggaggctgaggcaggagaattgcttgagcccaggagccagaggttgcagtgagctgagatcgcaccactgcaccccagcctgggcaataaagcgagacttcatctcaaaaaaaaaaaaaaaagaaaaagttagagacctggtttctcatagttgcatcactgctgtgtgaccttgggcaagtcacttaacctctttgagcctctattttctcttctggagtaggggtgataagagggcctattaccaggtcattgtgaggattgacaaagatgatgcatccaaaatgcttagtttgggctgagctatgggacttggtccagttatttccaccagcatcaacatcctcactgtcattatcattgggcagaggcgggagtgaggggtctttagtgagagaagcggagtttagctccgcctggatgtggctgcagcatttgttcattcattcattcatttactcagtaattattgattgagtggccgctatgtgccagaccctggggacacaacagggaagacaacaagacacaaatctctggcctcatggagctgacattcttgtgagagagaaagtggaaagggtggctgggcgcggtggctcacgtctgtaatcccagcactttgggaggccgaggcgggtggatgacctgaggttgggagttggagatcagcatgaccaacatggagaaaccccgtatctattaaaaatacaaaattagccggatatggtggcgcatgcttgtaatcccagctactcgggaggctgaggcaggagaatcgcttgaacctgggagggtgagcagagatcgcgccattgcactccagcctgggcaacaagagcaaaactccatctcaaaaaaaaaaaacgaaagtggaaagggtggtagagggggctgaggagtttggaaaatcttgctgtcagtagggagccattgagtgttgagttggggtgggggtgttatggttggcacatttgcatagttactgaggacaggttaggaggggccctttctccctaatgccctacactgttcccaaccattatagtgaagctctttgaggtgattgagactgagaagacgctgtacctggtgatggagtacgcaagtgctggtgagccgcccaccctctccgccctgcccctgtgccacctccccctgccgctgcacctgaccctgaccccgctcggcctctgccctgcaggagaagtgtttgactacctcgtgtcgcatggccgcatgaaggagaaggaagctcgagccaagttccgacaggttggggcagggctgagggtggggctgactgggtgcctgggtccctgggagggcgtctgagagctgggcatggtctgggctgtccagcgacctgggggcggggcttaagtctgggcaggggtgaaggtgcagagctgggtgtgctgggcatatagttgcccagatgtgagggcatccggatgtaggtttgcaggtgccccgttgggtgggtgagaggatgtttgggcatgaaggcgccccggtgggcaggtgttgcatgtgtagggcatgtgggtgtgcccagcgcgtaggtgtgtgggtgatgggggcacgaaggtgccagggtgccaggtgtgagtgtgccggagtgtgattcaaaagatgtgtgggcagtagctatgtgggtgcccaggtatgtaggtatgtaggtgtgtggggaagagagtgtagggcaccccaggtagatgggcaagagagggctgaggggtggttgtgtaagcttgtaggtactagggcatgccggtatgtgggtgcccgggtgtgcgagtgcccagatgtatgggtttccaggtgtgtggtagtgaggacacccaggtgtgtaagagtgtggggggggccaggtgtggagtaagaggacgtgcaggtgtgagggtgcccaggtatgtgggataagaagaagtgcaggtataagggtgcccaggtgtggggtaagaatatgtgcaggtgtgagggtgcccaggtgtggggtaagaggagatgcaggtatgaaggtgcccaggtgtggggtaagaggagttgtgggtgtgagggtgctggggcatgaggggtaagaagatgtgcgtgtgtgagggtgccaggtgtgtggggtaagaggagatgcaggtgtgagggtgccggggcatgtggggtaagcagatgtgcaggtgtgagggtgccgggcatgtcggctaggaagatgtgcaggtgtgagggtgtttctgccttgacgctgctgtcctgaactcaagggccataagccctggtgagttggggcggcctgtctatctacaggtatgggatatccccatgggagtttccagatgtgaaggtcaagagaggctggtccccatgccttggttccgacatccctgggcatgggggtgtcctgggggagacgtgtgtctgcccaggttccacgggcacctcttgctgtgactgaatcagggtgtgaggccccagatctcaggctgtgccttggggaggcctggggcccagctgtgagtggtttcacagtccactgagggaggctgagggttttgggagccacaaataaccaaccttccccttccctcccagattgtttcggctgtgcactattgtcaccagaaaaatattgtacacagggacctgaaggtaagcccccgacccgctgtgatctcagggaccacggctcagcccacagacttctccctgcccccacccctccatggtttccgtggcctccagcaaattcctccagcccttttctcctcctgctcttccctccacacccagcacccccttgaccctttcccaagcttttgtggcagaaacaaggccagcagatgggggagcggatgggggggaggggacaggaggagtgaacaaagcagggagaaacaaagtgtcccaaaatggccctggatgctacagggctgttggataaggacgctgggacatgataaggggtttgtcgctctcagagcctttgggaccttggcattctccgaccttaggacattcaggactccttgaggatttaggttgcagagccccagagtcactctgcccacagggtcccagagtcacaggaatctgagaacttttttttttttttttttttgagacagagtctcactctgtcgccctggctggagtgaagtggcgcgatctccgctcactgcaagctccgcctcctgggttcacaccattctcctgcctcagcctcccaagtagctgggactacaggcgcccgccaccaagcccggctaattttttatatttttagtagagacggggtttcaccgtgttagccaggatggtctcgatctcctgaccttgtgatccgcccgcctcagcctcccaaagtgctgggattacaggcatgagccacggcacctggccgggaatctgagaacttaagaaggcttcgtttttatttttatttttgacatggagtttcacactgttgcccaggctggagtgtagtggccccatctcagctcgctgcaacctccgcctcccgggttcaggcgattctcctgcctcagcctcccgagtagctgaggtcacaggcacctgtcaccatgcccagctatttttgtatttttagtagagacggagtttcaccatgttggccaggcttggtcttgaactcatgacctcaggtgatccacctgcctcggtctcctagagtgctgggattacagatgtgagccaccgtgtccagtctgagaaggggctttgagagaaaagccaccttggccagtaccaggcaggaagggactcaacggggctccagcccagctacctgtaggagctgagccaggcagcctcctcgagtacctgtggccccagggtccgcattccacaccttccgctgtatgtctcagtcctcgcgctccaagaccaggtggctgaccgtttggttggctcaaatccggttgtcttgactgtcgttttgtgagcacctgtgtgctaggcggcatcctaagtgctttaaggaagtgcttctggaactatctgtgaggaaggactgggttggttttgttgttttgttttgtttttttgttgcccatactgaagtgtgatgtttccatcacagctcactgtagcctcaacctcttgggctcaaatagttctctcacctcagcctcctgggtagctggaaccacaggtgtgagccacaaagcctggctaatttttgagttttttgtagacaagggatctcactctgttgtccaggctggtctcgaactcctgggctcaagagattctcctgcctcagccttctgagttgctgggattacaggtgggcaccaccatgcccagctaatttttgtatttttagtagagacggggtttcaccacgttggccaggctggtctcaatctcctgaccttgggtgatctgcccgccttggcctcccaaagtgctgggattacaggtgtgagccactgtgcccagccacaaaccccattttaaaagctattattagattctaaagaaattccacagtcaaattcctatggaggaccaggcgcagtctcacacctataatcccagcactttgggaggctgtggtgggaggattgcttgagcccagaagttcgagaacagcctgggcaacacacccaagacctgatctctacaaaaaataattgtaaaaaattagcttggctggacgcggtggctctcacctgtcccagcactttgggaggcctaggcaggcagatcactggaggccaggagttcaagaccaacctgggcaacacggtgaaactccatctctactaaaaatacaaaaattaggtggtcgttgtggcgcgtgcctataattccagctgcttgagaggctgagacatgagaattgcttgaacctgggaggtggaggttgcagtgtgccaagatcgcgccagtgcactccagcctggacaacagagcaagactccatctcaaaaaaaaaaaaaagaaaaaaaattagcttgtatgcctgtggtctcagctactcaggaggctgaggcaggaggatcccttgagcccaggaggttgaggctgcagtgagccatgatcatgccactgcattccaacctgggtaacagagcaaaaccctgtctctaaaaacaacaacaaaaaatacaaaagcagaaagtgcatctgaaaaaaagaaaaataatacaaaatgaaaacaaaaaacaaattgctatagaggttcaagtgctaaccctctcttcacttccttccactgggctagggtgtccctccacacggccctggaggcagcaccttagaggcttccatgattcacctggaggtcgtatgtcccctggtggagggtccccaaagcagctaacacgagttttggggtcgtattagtacaccaggggtaccaaccaaggggaccaacccatgtgactttggggctggattgcggagcctcaaatggcaggaaaagaaatgtaatccctggcctggcgtgacggctcacacctgtaatctcagcactttttgggaggccgaggtgggcggatcacctgaggtcaggagttcgagaccagcctggccaacatggcaagacctcgtctctactaaaaataaaaaaaatagccaggtgtggttgtgggcgcctgtagtcccaggtactcgggaggctgaggctggagaatcgcttgaacccaggaggaagaggttacagtgagccgagatcgtgccactgcactccaacctgggtgacagagtgagactccatctcaaaaataaaaaataagaaaaagtaagccccgagcaagccagatgctattacattcaggtttagggaggagctctgtggtgtgtctttgtagggtttgggcctttattggggcaggagctggggaagagtggtccagaaataaaccaggagacatagggagacctgggaggaagccagggatgctggtgacctgggcgagggaaggaccgcagttgggatgggccagacgcgggtgacattttgaaaggtggaggtgtgcctctgtttgtagtcagaaggctggaggcttcttcctccgcgcactgtggaaacgggtggccttgtttagattctagttgtgctgctttcttgcaatgggcatgagttgtggcctcccacagcttctgtttcctcccctgtgaaatggcaattgcaagaccgcatgccgcaaaaaaatagacaaaactttataacaatacaaaacgtttatttatttatttattcacttatttttgagatggagtctcgctgtgttgcccaggctggagtacagtgatgcagtttcagctcacgcgattccttgcctcagcctcccaagttgctgggattacaggcacccgccaccacgcctggctaatttttgtattttcagtagagacagggttttaccatgttgcccaagctagtctcgaactcctgacctcaggagatctgcctgccttggcctcccaaagtgctgagattacaggcgtgagctaccgcgcccggccatgaaatgtttactgatcactgactgtgctctaggggccgctgtgagcactttacgcttaaacccacaaccacgcttgaggcaggtgtcgagatcaccctcagtttacatacaaggaaactgaggcacagagaggtctggtaacccacctaaagttcacacagcgagtgagtggtggagctgggatttgcagctggaattc

SEQ ID NO: 30 - DNA, 158692 bp, Homo sapiens
gaattccttctgtggataatattaacgtgctaatagagcaagaaaaccctgcagacttgcctccgaaatcattcttgctcaggtcagtgaaaatgcaataggaacttttcagtctgtaagggagctgggtcttctgtagcactgggctcttggctctccaaatcactcccttcttaaaatcatcccgtctctctatggctcctcttccttggcgggccacccatcctggcttccctgggttctgccctcagcccactctcttctcctgatgctctctcccagccatggttttggaccccaccataagctgattcatctctcgcctctagaaacactagtatcctttcctgtctcttgctgaatgtcccattggcatctcaaaatcaacatagctaaaactaaaagcaactaaaagcatgttaaaaatgaaaacaaacaaaaaaccctactccccatcctgcccttttttttttttttttttttttttttttttttgctgttagaaaaaaatgcaaccccacctttcttgggacaaaaatttcatagaagtcaaaaatggcaacagacctctagataaaagcattagcagagttccagtcagaatactgcactcccttaatgctcaatttaaaatgaaacctaaagcaacagaatacattgagtataatgtttcttaagagaattcatcagcagatctataccattaaagtattagcaagaaggtatgtttccattgaattacttagtatgttcctatagtacagccaaaagagatgcacacacatcaatggctatcaacaaaatgttaatatgaacgcacctgcatacttctctccctttatccttccttctgcccctctgctgccaacctggtaaacaagttgtaatatacactgctcagaggcagtttaacaattccatgtccatgatgcctcttttatgtcaattacaacaaaaagatatttacaaaccagctaattggctaactctttttattctacattttcaattcaggacacctatgaaacttagatgttgcaaaataataaactttgtccataataaacacagggacttttctaaaaatgttcatagaggcctatggttatcatctgaaaccatcttccagatctggagatgccagcagagagccctgcccttcaaaacggagtcctgtacacagtcacactgcacttcccatgtccaagatggttccattaagttgtataagcctgaaaatgaagaaccatcacaatacccctgtggtccttcacccacacatccctacccaataaatcaccacacccatttgtgtctacactgggaaaatggctctccagagcgcatatcctgatatccccttcccatccccaccaccactgctgaagctgaggcctcacacactctcacctgggttacttcaactccctcctcacctgtatccattctttcaggcttcaccagccactggccaggtacacttttcaaaaatgcaaatctgagctctcctctgccctcctttcaactactgagactctcaggaggctccatgtctgtggcagtctgtggattctgaaacttggccatcatgacgtaagtatagaaatggagattatgaatctagaaactgttaggaaaacttcaccaagtaattttatgtatgtcgaaactaatcatgaaaagctagggcttctgttttgggtgtcttcatttttttattttactttccttggaactcatatttattttgttttacttaagtattggtctatgatgaattggtaatataaagggggaaactgttccttcaccgtaggtagtttgacaggcacctctgtgaattgtcttcctcctcctgatcgtccttgggatgaatttcaacctcctagagtgttggggtgtcatgcacagtcctgcctacactcaccacccaccgcgaccccacagccatttcctttctcctgagtccttgctgtgtgtgggccactagccccccggctttgttttcctaactaattcctgctggtcctttcagactcagctcagactgagccgggagtcctccttcttgctccagcgcccctccaataacccatcgcagctctgctcgcggctcactttctcttacacggctatgagctctgtgtcttattcctacctcttctcccacactttggccaataagtttttatccaaagaattaatgaaaagatgagtaattagattgacgaaaatttccttgataaccttgtggacaagatggagacagcaaatgagggtctagttaggtcgtttcagatagctgtctattggatgctcaatacaatgttattaaatgaaaaaataaatttatgactgggaatgaagtgcttaaaattattgaatacagagtgcaaatcttctttaatgcttactatacctccattatcagtgcctgtgatgaattttggtaacaaagagaacaatatccaaatggtctcctgttcgccagctcaggcaggccaactctgaggccagcaacattgcaatgacacctgcccaacgatgggaaaacctgttctctatgtggaaagccattgacctaattatccaatccgcggagttcctgctttcccctaaatcagcaagaagaattaagggcaagagaaaacagctcatcctaacttcccagcacctccctctagcggctgactaaatttagctatcgacagcagctcttgacaaaggaaagaaggcttgtttatttgggtgctgtgcacaagtgtccatctctccagtacccaggctttggttcttaggcatccagctccctttatccaggcatcctccctaaggaaagatggaactagagatggcaacgactccttttggaccccaggttgactccagtcaggtctcagcatgtcatcacggctatcagactgctccttgcaataaatcagctgataccagcgcccctcactcatgctctcccccagggtatgtccatcctcctaagcagagcctacttctcatcagcttatttgctcctaaaatctatatactcctaattgccctaattttacagaggatcattatcttagcaaggtaacatatcgaattgatgatgatgatgtcagtaatggtaatgatagtagtactgaagatgtaatgatgctcttttttcttctgcaaatttttctgagtactgaacagggccactgctagcctataccctatctttttgtgaatgcaaaagaggtgaccctttctcagacaggcacagccccacaccctggagccctgctatgcaagtggactacaagcttgacttcagctccctctaaccatctctgtaggatatccttgtgcagggatctacctacacacctgtatgcaatggtgctcgtgtgggcaacagcctgaataaacagtaaaagactaggcagcctgcaagaaagaggcaagtctgtgtttatatttgggcaggggaaaagcagctatatggtgtggaagagaagttggttgcattgtcttgacatttcctacctccctcagtaactttgggattgctggaaagaaaaagtcatttcaccactaatatgtggtcctagaattgacataacaagtgagtctttgcctcacttgttctcattttcctgccaaagttggggggaggggggcggcgcacatagcaatcatgcctcttcacctttgggaggacaacctttgttcctagtgtcagagaggagtgtcagacccttgaccatgcttttagggatggaaatggcagccgtctccacatagatggatgggtgagggatggctcaggatggaggatttgtttgggccccgtgaactattagcttcaagaggaatctcagaaatccctgagataaagaccctccctccctcatatacaggtattgataggagtggtttggttgctggaatccagggcttcctcccacaccagggttctttccatagtatccacatggcaaccggaaaaatcttgatttttcttactaagtctatttcccagctaagttgacttttcccaaaactcactctactaaacaattgtcctccaagatgcagggtgactaccaggtttagaggtcgtataaatttaagaaaccaggacgggcacggtagctcactgcctgtaatcccagcactttgggaggccaaggtgggcggatcgtgaggtaggagatcgagaccatcctggctaacacagtgaaaccccgtctctactaaaaatacaaaaattagccgggcgtggtggcgtgtacctgtagtcccagctactctggagactgaggcaggagaatggcgtgaacccgagaggcagagcttgcagtgagccgagatcatgccactgcactccagcctgggcaacagagcgagactccgtctctaaaaataaaataaaataaataaggaacgagacactgtaccctcctccagatattcagaaaagacgtcaactgcgtcaatttttttttttttttttttgaggcagagtcttgctctgttgcccaggctgcagtgcaatggtgcaatctcctttcactgcaacctccgccttcctggttcaagtgattctcctgcctcagcctcctagctaatttttgtatttttagtagagtcagggtttcaccacgttggccaggctggactcgaactcctgacctcaggtgacccacctgcctcagcctcccaaaatgctgggattacaggcgtgagccactgcgcccggccacatcaacttcttgaaagcttgaagagtactgcagaacctgtttaatttggttcaaaacagctttttcaagatttttcaaccacggactcctatttcatagcagcttctcataccctacacaactactgttcctccagacacactttcagaaacacaagacgatcttgttttatgtcatcagagaagccctcattagatgcaagaggcaaccaacacaaacacatagatcacctgcccattcaaactctattttccatccattgaaaatatgccttggtatttattttactgtgtgatagatcctgtcccaggagatgtgagaagtgcaaagcagcctgtgatagagacagggagggctgtcatttcaggccacgtgcaactggcaagactcctcaaatgcggtcagaagttccagggacacgtctgtatctatctcatctctaatggagaataatgccatttcctttgtctgttccaggccttgggagaggaatagtcatttgccgttagtgaaacagtttgatctcttttctcaaaaagctttcacaaactcaagcagctgttactgtctggcagaggatggtgacaaggacaaaagaacagggaaacgcccatcacctaaatcttccatgactgtagggtggggttgagggtaagaatgttgtgctagtggtttctagtccaagagctaaaacttagaagggaagtctttttaatctgatataaatcacaaatgccatacagttgactgaacaggactcctgagaaagaaacagaattttccaaaaattacatttaaccagacatatttgaaaagcaagtatttatggaatgtttacttattatgtaaacatttaacttttatttttatctacattcatttgtcttctattcaacataacatttcatttttaacatagaggaaaatctgcccttgaagctttttgttttgttttttcctatgaatcatcaatttcttgatgcaaagcaaccaacactaaacaggctaaagggactttaggtctctttcattttttatttgtaaaaatgtatgggcacacatgaaattttgttccatgtcatgtgtaaaatgtgtagtgatcaagtcagggtatgtggctgtccatcacccaagtacaatacatttttgttaagtacagtcaccctactctgaaatcaaacattgactctattccttcgatctcactatatgtttgtaccctttaagccacttttcttcatcttcccctcctcccccagctcacccctcccagtctctgatctctatctttccacactctacctccatgtgatcaaatatcgtagctctcacatataagtgagaacatttaatatttgtctttttatgtgggttatttcacctaagatgattaatctgtcttattttacttcagataatgaccttcagttccatccatgtttctgcaaatgacatgatttaattcttttttatggccaaatacaagtaagttttgtaatataatcaaatcatagtgattaaaaagtatggactgtggagtcagagagctggggtttaagtcctaaccatataactcagtagccatctgtgctcagcaagcttttttgtgtcgcatgtctgaactttagcacctttcacctcaaatggtgccccatagggttgctgtggaagctgaattataacatatgtcatgtctagcaaagtgtctggctcataataatttctccaagaatggcagtggtgatggtaggagtcatagttggaaaaagtaatcactcataattattatacaatcataatgaaagatagagaggcactgggaaaaccactaaaatatatatatacattttatatatatataaaatgtatatatatataatatatatatgtgtgtgtgtaacaatcaggaatgcacacatatttcaccaaaaaacatgtactagaatattcacaatggtactatttgtaatagcccaaacctggaaatacccacatgtccatcaagagtagaatgaataaattgtgatatattcataacatatcaatcacaaagattttagaaatcttaaacagatagtggctcacgcttgtaatcccagcactttgggaggccaaggcgggcagatcacctgaagtcaggatttcaagaccagcctagccaacatggtgaaaccccgtctctactaaaaatacaaaaaattagccaggtggggtggcagatgcctgtagtcccagctactcaggaggctgaggcatgagaatcacttgaacctgggagggagggaagttgtagtgagccaagattgcaccactgcactccagcctgggcaacagagagagagactgcctcaaaaaataataataataataataattacagatgattaagtatagaggtgtccatagtaatattatctataacagaaaaaccagaaactagctgaatattcatcagtaaggaaataactaaatatatgttttcatagtcataatgttcacaaatccaagccctgctatttacccatttggaggcattatccaattcttctaagcccatatttcctcataaaatagataggcatggcccttaacttcagggtcactgtgagaataagcaaaggcagtaattgggccccttactggtggactgtctctgactctagggatgttttagttgacaaggaaaggactgccaggatatgacaaatatttggaactcctcctaaatagagaaggtctggaagagaggaattctttcaggttcattcagtgacccctgtcagggatcgctgtcagttggaagagggcatggagcagagaggttaggaagtccagctctggagtctgtcttcatgagttcaaatatagccaccaacatgcattagctctgtgaccttgagtaggttgtctatccattctctgtctcagcgtcctcatttataagatgggatcatggtttcctcctgaaaggtctgtggagaggacaaaatgagataatatacctgtgaccagtttgctagtgagctgggctgggcagggtgcttgcagaatgcactgaattcttcctttccaaaccgaccctctttcatcttcctcctcatcctagacaaaaccccccagactatccactagatgacagtaccccagctgtgacaatgaaaatgtcccctagggggcagaatttcccctggttgaaaaatcactgaattaagactgtcccagataagatgaccaaaattttcagtgttttccaaattgcaggagacactttaagctccctgcattcttggtttaaagaggcacaaatctctcccttcctctaaaaactcactaatgtttttcacagtcatctcacattttgtatttcatagcctggataagagggatgatgaaccaagcgggcaaaatctggctttgaccacccccagcaatcccacacaaataatcttttaaggatgtgggggcatttgtcagcttttgtactcatcatttgttgaaagaggagacacgtttagttcaagcacacaatagggacagaaaagaggctatgttgaatattaggttcagggacaccataactaatttaaaacaaatgtgcatggcattgagaaaaacactcttcataagaagaaacaatgttttaagcacatacagtgtcctaatataatgacttttgagggtgggtttagagtgaaaagggctgggaagatctctatgtcccaaggtgtctgattccattatagatgtttatgcagttgagagtcattctagcactgccctggtcttttactccctaggatgaaaggagtgtgggagaaagaagtcagagctgagggctaggaagaaaggaaaacaagggaaaagaggaagtaattattcttatttctttttagtctgcctcaatcttcaaaagagcattttacctacagggatgctttggggttttttggggtttgttctttttgttttgttttgtttttgttgtttttatgttttgagtttttgttttgttttttttttttgagacggagttttgctctgtcgccaggctagagtgcagtggcctgatcttggctcactgcaacctccgcctcccaggttcaagcgattctcctgcctcagcctcctgagtagctgggtctacaggtgggcgccaccacgcccagctaatttttgtatttttagtagagacggggtttcactatgttggccaggatggtctcaatctcttgaccttgtgatctgcctgcttcagggatgcttttgtaaacgcacggcttggttctatttcaaaatagtctaacttaataggaaaaaaaaaacaagacatgtagttcaataatattttattgtcaatagcataggaaaaattcaatattgaatctcagaacaagaagaacctatttacaatgcaggtcaaggaagagatgggagaaggaatgtcacaaaatttttggtaaatacatattttttatagagaagtaatccatgaacctgcaacacggatagcttatccaaccaactttacaaattactattaatataagttacatgcttgccatctaaagtaactaaacccatagactgaaaaactatgtgtcaaggtaacgtgagcactttaatcactttacttatattttctaaaggcagtagtttcctctccttttcccgctatcatattagatgaagagacaagttccttcaacacaaattctgatatcggctattgtgagaatccctgtgcaagtcagctagaagcccctgccaccagtctagtgccaaccaaatgaccagatgggacagctatcaaaaatgaaagtgaatttatattaagatctgaacttcctcttggggtcttgcatttcagctactagaggtctataattccttatccaacattccacaatctgaaaagctctgcgaacgaagtgtttttgtaagttggtggcatacgcatttggcagcaaattttgaccccttatgggctacttagtctttatgtatccattttgtctgaatattctacattttgttgcagcatattaaggtgttgatttatagggtgctgccccagatctgatccatgaagttctataacatacagtgtatgtaaaatattatcttttgaaaatccccaaaattcagaattttaataaacacctgcctgccagggcttaacataaggacttctggacctatagtagcctgagcatgtgcccaagtttcactggagccagggcagtttcgtgggtcccatgcactacactttcttcagtctttcagggaagcgagaatgtctggaacattctctatcccaaagaaggaaagcatagtgctgggaagaagagcttccaaatcttccttataggaattttctttgtggaagactgtatttctgccaactaccccggacaatttgacaaataatgaataaatatttttcctctaacgtgattccttttcattaaaagcgtatgtcattgtcttatgggaaaaaaggaaacaaaagatagaattggaaaaaaaaaaaaggtctatctgtgtgaaggctacatatgacaagtactggcggcttcctgatccagcaacattagcaatttattgtatctagaaaatgaatctctggatgcagagtttacagaaatcggcatccacagaaaagtcagggaggacttaacatgggctatgccacttaaggagaacagaatttgccaaagaaaataatgtttcgagttttgttgtgcctgatgatgtaaataaagggatggtcagcattcaattcatccttgtgctgcaggatccgtgctcctggcacctctatggaatccccaccatcttcagttatttctaagcacactttgtggataacatttgatagggccactcccttggtctctgacattccagagaaatcagatgtgtcttcactgaagatatgtttcagccctagattttccagacaagccttgggatcaatcatcttttccaccttaaattttggaatggagagtttgaccttggcattggccatggtgctgggattagtccactgtgacagtgactctgagttgagttgtttttcaatctgaaggacaaaaatgaaaagaaattatttttatttatttccaactgtaaaagacctggctcaattgaaaacataaggtgttatgataagcccagcttcaaagcagtctgggtggaacatcaaagatggcccagaagtttttggtatgtgactcaggagacccagcagccacccagctgtgtcctcctcctccccagcctataacagtgttccatgtgcactgaaatttatgaggacagggttctgttttttcattttaagttagagagtagttttttgtttgtttgtttgtttgtttgggttttttttagacaatcttgttctgtcacccgggctggagtgtaatagtgtgatcgtcgctcattgcaacctctgcctcctgggttcaagcaattctcgtgcctcagcctctcgagtagctgggattacaggcacactccaccatgcccagctaaattttcttttgtatttgtagtagagacagggtttcatcatgttggccaagctggtctcaaactcctggcttcaagtgatgtgccagcctcagcctcccaaagtgctgggattaaaggtgtgagccaccgcacccaaccttaagttagagagtagatttatagaaacaaatgcctggatcatgatgttgcatacacaatagtgaaatgaatataaaattagaaagctttttacacatatttcttgaatgcttattgtaatttctctacgaggaaatccagaatattcatgtactaggaatggcatcagatttagaaaattaaattaaagctaaagttactttttttttttaatgggaatttgaactaactctgagccatgccctagggtcataggtagtgaatgcatccattttagctgttttaaaaaatgagagagatgcggctgggcgcagtggctcacgcctgcaatcccagcactttgggaagccgaggtgggtggatcacgaggtcaggagatcgagaccatcctggctaacacagtgaaagcccgtctctactaaaaatacaaaaaattagccaagcgtcgtggcaggcacctgtagtcccagctactcgggaggctgaggaaggagaatggcatgaacccaggaggcggagcttgcagtgagctgagatcatgccactgcactccagcctgggggacagagcaagactccatctcaaaaaaaaaaaaaaaatcatttccaaaactcaaaaggtcattttctttagttctatactttaagaagaaaataattgaaagccaaaattgacaaatgggatctaattaaactaaagagcttctgcacagcaaaagaaactaccatcagagtgaacaggcaacctacagaatgggagaaaatttttgcaatctactcatctgacaaagggctaatatccagaatctacaaagaactcaaacaaatttacaagaaaaaatcaaacaaccccatcaacaagtgggcaaaggatgtgaacagacacttctcaaaagaagacatttatgcagccaacagacacatgaaaaaatgctcatcatcactggccatcagagaaatgcaaatcaaaaccacaatgagataccatctcacaccagttagaatggcgatcattaaaaagtcaggaaacaagaggtgctggaaaggatatggagaaataggaacacttttacactgttggtgggaccgtaaacaagttcaaccactgtggaagtcagtgtggcagttcctcaaggatctagaactagaaataccatttaacccagccatcccattagtgggtgtatactcaaaggattataaatcatgctgctataaagacacatgcacacgtatgcttattggaacactattcacaatagcaaagacttggaaccaacccaaatgtccaataatgatagactggattaagaaaacgtggcccatatacaccatggaatactatgcagccataaaaaatgatgagttcgtgtcctttgtagggacacggatgaagctggaaaccatcattatcagcaaactatcacaaggacaacaaaccaaacactgcatgttctcactcataggtgggaattgaaccatgagaacacctggaaacaggaaggggaacaccacacaccagggcctgttgtggggtggggggaggggggagggatagcattgggagatatacctaatataaatgacaacttaatgggtgcagcacaccaacatggcacatgtatatacatgtaacaaacctgcacattgtgcacatgtaccctaaaacttaatgtataattaaaaaaaagaaaaataaattattgaaataaaaaaagaagaagaagaagaaaataattgatgtttattggagggcgttttaagaacgaaaggtaaaatccaagacagctggataatggctgaaagatcaaagcataaaatggaaagaaaaaaaacagagagagtaatgcaccaaagaagaagaaggacaggaattataattcagttaataaagtggtggctaaaacataatggcaaccaaaggagcaagctggagactggatggtcccctggaaagtcagcaaatcactgaggcccatgtggatatatagcaagtgatccaggccttcaaagagccccttcttccttcctggccaagggttgaggccaggcggggtggagctagaatggaagccagggagggactaaagggagaacaggcctcagccagctaagcagaggtgagggagcagagaggaagctaaaactccattcacctgcagagaaaactgctactcttatttaaactttgtgccttaaaaatctatataaataaaataatataataacccttatcatataaaataaaatacttatatataatgtgtactataaaatagtatctgcataattcaaaattttgaagcatatatgtgtacgtattaaaatctcataaatgtacaacacaaagagtgaaccgtaacgtaaattgtgaaggccaggtgtggtggctcatgcctataatcctagcacttcaggaggctgaggctgaggattgcttgaggccaggatttcaagaccagcctggacaacacagtgagatcccacctttacaaaaaaaaaaaaagccaggcatagtgctgtgtgcctttagtcccagctacttgggaggctgaggcaggaggatcacttgagcccaggagtttgaggttagagtgagctaccatcatgccactgcactccagcctgcccaggagtttgaggttagagtgagctaccatcatgccactgcactccagcctgggcaatggagcaagaccctgtctctaaaacaataataataataataataataataatagtaatatgtcagtattggctcatcaattgtaacaaacataccaaactaatgcaagatgctaataacaggtgaaactgtaggcctgggacgggaaggggagtatatgggaactccttgtactttctgcttatttttctgtaggcatagatctactctaaaaataacatctactaattttaaaaaaaaagaaagagcaagagagaggatgcttgacatcaggtcacatgatagtggacctggcagtgcgtagcaacgtagtgccttaactgcctaggaggtgagggagacactctagccttcagttaagaacctggctccaactacctgggcccaaatcctgatcctgcacacacccttgactaattatgtaaccagttacccacccctctgtgcctcagctccctcactggtaaacaagagtgtggtaacagtctctaactcatcagcctgctgtaagaattaaatgagataatgcacgtaggcaacttagcacagtccctagaacactgtaagtgccaaataaattttggctgttgttaatattaaggaggaaaggccccagaaagaaccatgggtccttggaggtgactgagccagtggcaataagggagggctaccggcccagctctcacggcccacacagacctgttggcacaactctttgccaaggcagggggtgcctttgtggagagcacctgccttctccttaccttctccaagcctgtggactcatcctccacatccttgggtagtaggatgaacatgctgagatgcttattttgaaaaggaagctctatgatcttacaattgatactgtcaatgtttcccatacagaacgtggcctccatgttcatcatctgcactggtttggtgtctgtctgtaaaagggaaaatttggactgcttacttttcaatttacacatgcataaatatatatatatatatatatacacacacgcgcgcacacacacacacatatatacccacatgtatatatacagacacacatacatatatacctacacctatatatatacagatacacatacatatatacatacacctatatatacacatatacatatatatgcatacatacatatacatacatatacatatacacacacctatatatacacacttatatatacatactatatatatataccccatacatatatacacacatgcacatatatacacatatataggcaaacacataaatatatatgtacatatatatatatacacaaatttgctcttgacacagtgtcagattattatggcttataattcatcatccactcagatccaaactgtattgcactgaaaccagagactgtcctgtgaagagtttgtgttcctttgaaaagttattcatatactttataatctacatgttacacattacatgaagtatatataatactgtatttgcatagatcaaaccttaaaaataagactgtatggctgtaaatataggcaacgtttgttattctttacagatgcctatgagatctttaaactattcctggtggagctgacttgaaagtaaattctactgcaaacccacataaccatttatacggcttttcctaataaaatgcctaatttcaaaaactggctgggcacggtgcctcatgcctgtaatcctgcaccttgggagaccacttgaggtcaggagttcaagaccagcctggccaacatggtgaaaccttgtctctactaaaaaatacaaaagtcagccaggcatggtggcacacgcctgtaatctcagcttcttgggaaactgagggaggagaattgcttgagcctgggagccagaagttggtgtgagccaagatcataccactgcactcactccagcctgggcaacagagcgagactccatctcaaaacaaaacagaacaataacaacaacaaacttagcacatagcagaacaaaacaatatttgttgtgacctctctgtttgtctttggtttgaattgcccactccccactgtactgccacctactcagatctgagctaattaacaaagtctaaattgaagataagaaccttggtttttagtcccaaatgtgacataaacagattctgtggccttgagcaaatcactcaatctctccaggcctcagtattcttgtcagtagaatgaagaaattgtaaattcagaataatggttaccactggggaggaagaaagaggaacaggacagtggagtgagcagtgaagggatacatacaaagcaatgcaactgttgttatattttttctttaaaatatctgaaataattaaggcaaaatattaagttcaaaaagatgattgatcggtatatgggtgttcgttttattattctctatcattttctgaatgcttggagtattgcataatttttaaaaaggaaaatgttctttaaaattatctctaagtctttttaaaattatctctaagtccctttgagctccactgtatgcttggctctttttttttttttttcagaaacgttgtgttcaatggtaaagcttagcacagcccagcaccaagaatggtgtgcagccgcagcagcagggacaggcaggtgacccccacagagcttcacatggcgaagaggataaggaaggcgaccatcaaacagaagagccccatggcctcagacagggcaaagcccagaatcgcataggagaagagctgctgcttgagagatgggttcctggaataaccaatgatcaagctgccaaacgctattccaatgctagcccctgaaccaaccacaccaactgtgtctgcctcagcaccaataaacttggctgcggtgtcaatgtcccaggagacaacctggtctagaactcctgtctggccacacctaaagtggggagctgctgtaggaaggctgtttagatgaatgctctgggctattcaagaaggaggcagacacaggccggattagacccctagtacaacagcggatcagagctggagaaataagtaatgccccggtgggctgcattttctcagtctcccaactttagcccttggtctctccctgctcttcttaaagggagcccatggaagggtctgatcgttcaggtcttttatgtccaagcactgcccaggccttttcttctctttgctcctattaacacctggcctcctgtctctgctccagagatgactgatttcctgaaggaaaattaattcacgctaagttgtaaaagactgacagtaatgttgtataacctattgacatatacctcccatgggatatttgcctgttaactaaatctctttggggagaaatttcaaacttcatatcaagcctgcaaggataatactccagtaaacttgcatctggtatcttcaaatactaagctgaaccttccccaatacctctctccagcagagctaaacgttatttattttacttttgtatatacctctattttaacacttgccacagtgttagaaatattatctagtgattgtctttccacttcccaccccaactagaatacagtcaaggcagaaactaagtctcattttctaccccagcttgtagtttctcactgaatatttggctgataaataatggaagacttcaactctatgtgtaaccaaaaacagaattataggaaaacatactactttggaggttaacagataattcttccctttatttctcctaaagaggatattgtcttaaaatatattcctcctaaagaaatttgtctaaaaatctccaacaggttagactgctcatagtttctgaatgtgcacatagttgtggcctccaaaaactgtcatcaatttcacttatcggcactgactacaggtactttattttctgaaacacatgttgagacgacatatcttctgaaaagaggaccaaataaagactatctaccccagaaaatataatacaacatatatactaatatagatatatatggatagatatctttatcagaataagtactatactaaacttttaatgatataacttcaccaatttagtctaacccttaccggagacaccacggggcataagaaaaggtttagtaatgtcactcaaaaagttctagggtggacaaagcaattcaaagaaaacaaaggagaagtaatagcatctgcattcaaaagaagggtgtagcctcatgcagctgtgaatagcattttattgctttatcaagtgaaacactgagagatcaatgacatttcaaacttttattaattctgttcataaaggctgagtttccaggatcttatataacccagctttatgatttaatagcaagaataaaggaatagcacacattcttcctcccttctcaaaaaacacacgttaatactttcttaatgaaaaaagtacgacccttagtgtggttgacacaaaagtccacattctactcattgactattgcaacattttcatggtgttccttccaggctggctctggggtcttgaagagaggcaccattggcaacctgtttcagatttcacttaaacagagttaggaaccctttgccagcccttgctatggaggagagccaatcactaatcaaaggagccagaagggtcactctatgacagcaaaggctgtgtggatgccgtcagggccagtggggccaacacccctccctaactcacagtagaggctgggtaaagtcacgttccacttccactccagataaaagacaatactgagaaggtcaaaaagccatgcttaaaactcaaggacctgtgtgtgcaaaacacaagagtgtgaagagcataagctatgtctctagaatctcagacagacctcttgtgtgcagggtcaatcctgtctctgcagtcagctttgagaagaccactgcagttgggaagctaaactcaggaagttaggaggacctcctacccatccctcagctcccatggatattttgagttggtaaggagcagtaacagtcatcattgtcttctcccagtgaaaatgcccaatgggtcttgcataggaaaccatggtagtcccaaaggccagtcaggttttgtctgctattgattgtttaagcaaactgacccttagggactgatcattcattcagcaaatttgctgagcacctactgatgtgttagggacttggccagaaattgtagacactgaggtgaataaggcattgtccctaccttaaaaatcccatgcgctagtaggggatctatgtaagtaaacagatttcactgtggaaaagcaaattctggcagtggacaggggagagtatgaataaaaattccatgggaacaaagaaagaaagagtaatggaagccatccggctaacccaggcatagattgtatcttgcagggcttttcctcatggatgctagcattaagaaggtgctactatatttggcaaaaacaagatattgatgctaagtactctaactactgggagaagcatgaaaactagaactgacgcgtaggagctacaggtaactaagctaccttcaagtattgtactaactgaagtgctgcttccagtctaacacaagtcagatcccacccacggagaccacatcacatcatcatatagatgtctgggttttccaataaaatgggtcaaatttccagtctcagttccttgatctcatttacaaaagaggtactttacccatttcttttttttttttttttttttttttgagatggagtctcactttgtcacccaggctggagtgcagtggcacaatctcagctcactgcaacctctgcctcctgggttcaagccattctcctgtctcagcctcctgagcagctgggattacaggcacatgccaccatgcccagctaatttttgtatttttagtagagatggggttttactatgttggtcaggctggtctcaaactcctgacctcgtgatctgcctgcctcgacttcccaaggtgctgggattacaggcatgagccactgtgcccaccctctattaattatttaacatatttacttcaacagtatcaatgagactggcctgcaaaacaggcccttaattcttcccataatgacttccagtgatgtcaatgagtaagccatactttgttttttcacagccaacaagtgcctgaaagcatctggtcttgttgtttgtttgtttgtttgtttttcttgaggtggagtttcactcttgttgcccaagctggagtgcagtggtgcagtctcggctgactgcaacctctgtctcccagggtctgattctcctgcctcagcctcccatgtagctgagattacaggcacccacaaccatgcccagctaatttttgtatttttagtagagacagggtttcaccatgttggccaggctggtctccaactcctgacctcaggtgatctgccctcctcggcttcccaaagtcatgggattacaggcatgagccaccacgcccagccatcaaagcatcttataaattataaattaaaatcccagaacaatatacttcgctatcaaccgataaggaaatgagatgttagagaagttaatcaatcaggaacaagattcctagatgtcaaggtttcatgataatccaaagtcctctgataacagagtttggtcttttccttttctgctaaagttctcagatgtttgtagctatttttcagctggtgacttagctttcctcgctgggttacaaattctataaagtttcactcagctcagatccttgaagacattatggaaaagaggagggggggcctctggattctggctctttttgtaccacttaccttccagctgttcatctcaggaaaggcactttgccggccgtgccctcaggttcctcattggaatggatttatgccccactctgtccctatcatttttcacatctataattgggctccttttactgctacatgctgccccacataccttgttgactctgaaaggacattcttttgtttctgattcagaaaatttcttcatccacttgccaacaaagtaggcagcattaaccacaaggattttggtctggtcgttcacactgttgtcagctaaaatgttctcaaagtggcctgcaacaattttaggaaaacacaagtagcagaattattcttccaaactacatctgaaattcacatgcatattcactgagtatttaccacttcatggagtcacaccatgtaaggcctgatggttccaaccatcaaatttcagaaggactcctttctctccttctaccttgacacaaccagatctaccaaagaggtcagcagaggagaatgaaggagcagggaagaaaggaagagaaataagaaggaaagcacagctaccattctgaatgcctattctgtgtcaggcagtatacaagctatttgatacacattatatatatttcttcctactttatgaatgaggaagctgagactcagcgatgataagtcactttcaaggatgatatataaacaagggtggattcaggattcaaagccagctctttctgactccaaagcctgtgctcttgaatgaaaatacgtaatcactttctttatggcagaatttcacatatattatctcagtcttttcacaatggtcctataaggcaaagatcattatctccattttacagtgcagtaaactgaggctcagagaggccaaggagctgttctagtttcctcagctggaaaacatgtctgaaggttgtccccttcaccccacagctctccatccactctctcaattgcactccttgcgggcaggctgattgcctcaaggtcaactgtaatcaccatagggctcaatcacaattgcagttattataaagctaaatcccaatagccaaaacaattcaaggggagtgatcccttaataaaaagaactcctcacatttgaatagcccacaggttttttataaagggttttcattcacctaatctccaattttcagaccaatgttcagggcccacttcacaggcctgtgacccctgtgtgaaggaccctgcacttggtttaatgttcagctgtcactacctcaaaattcttaataaatgtttaaacaagaagcccagcatttttacttttgccctggaccatgcaaattatgtaactggtcctgccaatgctatataatatgttaaatatatattagtgttattgaagaaacctgaagaacaaagaagtgtgggagccggtaaacgacagagcttcaacttcaaccctgagcctcccatttcaaactcagaagtcttttcatggctggatgcggtggctgacacctgtaatcccagcactttgggaggctgaggcgggtggatcacctgaggtcaggagtttgagaccagcctggccaacatggtgaaaccccatctctactaaaaatacaaagattagctgggcgtagtggcacgcacctgtagccccagctacttgggaggctgagacaggagaatcccttgaacctgggaggcggaggttacagtaagccaagatcgtgccgctgcactccagcctgggcgacagagcaacattctatctcaaaaaaaaaatgaaagaaagaatggcattcacagcaacctagatggagctgaagaccattattcttttttttttttttttttttttttgggagacgcagtttctctcttctcacccaggctggagtgcaatggcgcgatctcagctcattgcaacctccgcctcccaggttcaagcgattatcctgcctcagcctcccaagtagctgggactacaggtgcgtgacaccatgcccagctgatttttgtatttttagtagagacggggtttcaccatgttggccagactggtcctgagctcctgacctcaggtgatccagctgccttggcctcccaaagtgctgggattatggcatgagccaccatgcctggtctgaagaccattattctaagtgaagtaacttaggaatggaaaaccaaacattgtatgttctcacttataagtgggagctaagctatgaggatgcaaaggcataataatgacataatggactttgtggggtgggggaagagtggaaggaggtgagagatagaagactacacattgcacacagtgtacactgcttgggtgatgggtacaccaaaatctcagaagtaaccactaaagagcttatccatgtaaccaaaaaccacctgttccccaaaacctattgaaataaaacacaatataatacaattttaaaaattaaatcaggtaacatgtgcctcattttacagttcagtaaattgaagctttgtgtccaaatatcagttagtaagtaccagtgtctggatttgaacctaggtgctgaatgactccagagaccctgttcttcccatgttctcatcctgcagttactgtcctgttagaacttcctcagtcagtacagagacagagtagctgggggcgccagtcattctcgcaggaagtgggtctcccttgccccggaagtgtatccctccctagacagcagcgactgcctaggcttcattctttcatgactagattcggcccggcctcccaacgggtccctccagatgcaattataaatatatccactggggagggggacaaagtcactgatttgccctcaaaatcatcataaccctaattcttttccagcaaggaagacgactcaccggcaattttaagggagggacgaggagtccgacgagggagacgcctgggggaagcactgagccggagaaagaacctaggagcttcttggaccccggggctatcagaggaacgaccagcatggggagctgcggcaccgaggacaagctgacactacggttttgtttggtttggttttctttttttaagacagagtctcactctgtcgcccaggctggagtgcagtggcgcgatctctgctcactgcaagctccgcctcccgggttcacgccattctcctgtctcagcctcccgagtagctgggactacaggcgcccgccaccacgcccggctaattttttgtatttttagtagagacagggtttcaccgtgttagccaggatggtctcgatctcctgacctcgtgatccgcccgccttggcctcccaaagtgctgggattacaggcgtgagccaccgcgtccagccggtttttcttttacatatgttgcctatgtccctttttccttaacaaatttgtaaaatttgtcagctgaaaggggcctcggggatcatgaagttataatccagtccctctatttccagactgaaaaatggcctcatgattggcccaaagtcatactttgttagaggcgcagctaggattccactagggcctgtgacagctcgtcagagagcaagacaaagtaaactaacactgaagcatcaacagtttctaccaagtgatgagatgatacaagaattgcccagaaatccaagttgtttacaggcttgaagggaaagaatttagcttgtgtagtaaaaatatccagagaatcctccagatgttttttttatccttggagcaaacatttatgagatggaaggccctgtttacttggtgattgatagcagaacaattaaagggtacttgccatctgtgagatccttaattgagttgttgatctgacctttcgtttcttccaatttatctttgaagtcaacagtttccaattcctttgcatacggtctcttcgtagagctgatgaactcctgaaaaacatgcagttcataaaatcagagtctgtagtcaagctattgcattgttattctcttctaacaaaaggattattaaatatcaactgctatatgtacactttcaaaattggtaacactatatgaattgaaacctcatgtagaagtcagtgaatttctttgtattgaatgtttcatttttttcaattataagacaatttcaattattaaatgcatctatcaatttaatatcagctttggggaaaacactatgttaaatatgcccaattctcttatgggttgtaatttcagaaacatgaaaattttgtatgtctacagatacatatatattagaatataggaaatgtatagaaaacagaattatgagcagaaaactcttgtctttgctgaactaaatatcctgtagacccttgctactcaaactgtggtccaaggtggtgtacagcatcacctgagaccttgttagaaataaagaatctcagaccccaccccagacatactgaatcagaatgcattttaacaaaatttccaggtgtgccatctgcaaattaaggttggaaacacaatgcaggagagaacataacaggagttcttattctaatgcttatttaaaatgtgcaaccctaaaccccattcccaccttgacaatcagaactacctgggtttaatcagaactacctgggttcaatcagaactacctgggtgttaaaagggcctgaagaacttgcccttttaacacccagatagttcttatgcaagagatcctccacagagcacacttgtttggacctttaactagtaaatttgcagatgctgtgcacctagcaggagcaatggaaagcagtcttttaaaaaatcttttgtaatgagccgagatcatgccgctgcaccccagcctgggcaacagagaaagactccatctccaaggaaaaaaacaaaacaaaactttacaactcctagtctggttaagatcattccagatgttgcatggaagttcagtgaaactaaatataacttgattcagtgtcatgtcagttcacttccaagcacagggcttcttgaatttcttcagagcagcttcagccttagccaattaacttagcttcagttaattgcaaatcaaccttgggactcactgtcaccattgactgacagaaccaatctcacctgaaaacattagaaagcctcagccagatgaaggagggcctccattgtcctcactgccagcaataaaaatgtgttaattgtctctttaatgatcatttagggagcttctagaaatgttgtatgctcaggcttcaactcacatctcagtttttttttttaaattcttcagatgattgttggaagaaaaatggttgtgtgtatgtatctttaagcaacaaaaaatatactcacaatatctagtaacccatgtcctcaaaagatcttaaccacaaaaatacctactgcagaaagttgcaaaatcatggtaaaatatttaaaagctggtagtctagcttttcgatttggaaaccttgaaattctgaccatccaaacaggaactaaatcaactctgtgttactgaagtacagagggaaacttcatgtagtctagaatattgtctgtgtgtttcaaatacagatttttaaatattacaacaatgggtaccgtagtggtgtttgtatgattccttagagcaatggctaaacttatataaccagagctgcctgtggagatccccatctgaccagcccagccaacaaaactaatttgtgactgatgaaaattgtgaattcatagttattatttttcttactgattttgagaaacatcagaagaatgtgtgcataaaaaatgaggtggagagcttaaaacattgtcccaggccatatgccctgctctttaaggagaaagaagtttaaatcattagctgtcttacactctgtaagacagctcattgtctatggagctacatttattagagagttaattactctgttctccattctctcagaggaaggtaaaagaaagggtaagatttatttgagagagaaaaggaaagcccataagcttctctgtattttgagttagaagatgtgactgcaattgattcccactatactcaacctctccactaggatttatttatttaaagcctcaaatcacaagtgaacatcctagaaaggaatttcactgaaaaaaagttgtaggtctaacagcatgaaaatgccactccttgtaaaaagttaagtcttgctacttgctttaaacaacttactgtagaaagattcagagatttgtctacgtagagccgcttgattagtttcagtgagtaaaaggaactaagtttgtttacatccgatgttactgtttgaaatccaaagggtacatctttgacattttcaaaatgaagaacctgttaagagaaaaatccgttacccaaaaagcattgcctctgagtagtgctgtactgaagtggacacgtgataatgaccaacgtccttgggcatacagactcctcctgcctagttcccgtaaagtaaggctcctcaacctcagcactattgacattcaggctggatgagtctttgtggggctgtcctgggcactgcaggatgcttagcagcatcgctgacctactagatgccagtggcatcctcctcctatttgtgagaacccagaatgtctccagacattgccagattatcccagagtgggaaggggaggacaaattgtccccactgagaaacactaccataaaggtactcttccaaatcaaccatcgagaacatttgtcctttcttcaaagtgatgcccttaatactcacacagaaggatttccaaacttggagaacgatgaagctgggttataatttctatccaattcaaagaccagagagagagattgatacaagagacaccatcatcaggcaggaatcagatttcaggacaagtgcctctagccagagtctgtctagtccctctgggtgctttagcaaatgccaggtaaatagatgtgtcatttctgatgggcagctacaataaatggtgggctgccctgggctggctagagtcagatggccctgcctgtgaatcccagccttcaccacctcttctccaactcttcagagaatcttctccaactcttcagagcctcctttcctctccgtaaaatgggctgaaaatacctgctttcctgagttgttaatgaggattacttatatgtaaaacacgtaaaatattatatggattcaaactgttaattattcttgtaataatattgtaagccatttaaaaccaggatactatcatttggagggcttaaatcattgtatttttttccttttttttttttattgttccaaccaatagtccagcatcttttctgccttgcaacaccacaacatgtaatgtcagcataagatgacaccctcctcgctccataactcataatggccatgctgtgattccacaacccagataacgaacgctgccaaaccggcacattgtcccaatgaattacatagcctcagcattgcagggtcaaatgctggtcccagacagtgcataactctcatgcctaaagatggatgaaggagaccagaaaatttaagagcccaggtaactactgctggggaaccagttgcatatactgagaagagcttgaggaattactgaggaacagacccactacccggaagttctctttcgctggcctttctctaatggtagatgagaaatgaggaatgggagattgggtagggatagtggagttgcgcagttcagagatgtggcttgatgtcaagatacatctcctcttcacaggagtgaagctgcttcaagtcccaagtgtaaattcttcatccttacctaaataactcttatgggccatactttctggacacatatgaatacaagaaggtgttgcctttttaaatgcttatgagctaatagaaaagaaattctattgaacctagaatgattagcataagagtaataatgaaatagaattagaagaacattcacctattatgtaaaagtacatgaggacttaaaacggaacaatcaggaaaattgtctcatttgaaggtctaagaactttacaaagctagataatcaaccatagccagaaagaaaccctaaaacgatacagatgctgcttgatttatgatgaggttacatctcaataaaaccattgtaaattgaaaatattataagtcagaatgaaaaagctgtgattacccagcagatctccaggttctccatcacagcctggtgcctgtcccagatgtgagttgcattacctacaagcgagctttcacatttaaaaataaattaagatgcctgtaatcccagcattttgggaggccgaggcaggcggatcacctgaagtcaggagttcgagaccagcctggccacatggtgaaaccctgtctctactaaaaatacaaaaatttgcctggcgttgtggcacgcgcctgtcatcccagctactcggcaggctgaggcacaacaatcgcttgaacctggaggctgcagtgagccaacatcgcaccactgcactccagcatgggtgacagagtgggaccctgtctcacaaaaaaaaaaaaaaaaaaaaaagattaagagagtcctggaatggcacagttctgaatcttgaccaattctggccacaaagtctacattccttttttccgtaggcactgcctatgggttctaataactgtattcccacttaaagtagaaacaaggttttggggcttacctgtccaatttcatttgcagtgtcacctttagcacccacttgagcaagtgacagagaggtggagagacagattggagagaagaggacattgcccagtggctccttttcacatagttgtttgaacagatcaacggcaaaagccgaatttgctagttgcagggcatccattgcgggcctggaagcaaggacaagggagcagttagtttctaaagcatctttaacgtcttctcaactgcattctgccaacactataagaattctatttaaacaaagtaattgatctcagaagaaacaaggaactttctgtaaattcaaaagtaagatcagttgtgaagaaacttccaggcaaatgtctgaaggcatgtgaggtcctctgtgtgtccagctctgcctagactctgcagtcttgggcctgctcagccacagtggccattgtcgggagcccagtggtcacatctcttctccagcatatgtcagaaaagttgacagcactaatcaacatcagttggttttatttatcacatattgtttccattaggatttcagttaaactacaaagttaaaacttttataaaacaaaaacagtcgaattgcagcagttttgcattgttcagtttaatatttagtaagtgtaatgggttgaattgtgtcccccaaaaagatatgttaagtcctaatccccattacctgtgaatgtgaccttacgtggaaacagggtatgtcctatttcttaactaatatataattagttaagatgaagttacattggagttaggtgagccctaatccgatatgactggtgtccttaaaggaataagaggagagacacagaaacagacatacacagagggaagatgtgaagacacaaatgtcttcacctgtgtgaagggcatgccgtatggcaatggaggcagagattggagggatgcttccacaagccaaagaatgctaagaactgctggcaacaccagaaaccaagagaaagtcatggaacattctcccctggagccttttgagacagcatgaccctgccgacatcgtcatttcaaagtactggcctccaagcctgtgggtgaataaagcttctgttgctttaagctgcctggtttgtggtgctttgtgagaagtgctagaaaacccttaaagtaactaatgcctttgcaggacacccagcacataacaatacttaataaacagcagcggttattgtttgcgtttataatacgcatctgtgtgtaagacactacccagagtgttacaaggatcagtggacctcctccttctctaagctcatagtctctttgggcagatatgcagacaaataactagaatacagagctgcccaagacatgtgagtggtataataagtaatatgggagttaaagaaaagagggaacagtttcaaaatatgtagcctggtaaagtggatatagcagcaactaggcatcttgtcacatctcagagctctttaattttaacacagcaacttccaaagtgttgtgtcttgactcctggcagtccctaacaccctttcaggaggtccatgaggttaaaactattctcatgataatactaagacattatcattctcaatctctaatagacagcggagttttccagaggctatatgacatcccttctattaagccaaatattaaggagatttgcaaaaatgaaaaacaatatcactcttctcattacattttttcactttagaaaatgttttttaatatatatattattcatattagtatttaattattatattattttaataaattagtaaatgaacatttcaaaatgtgtctggttttcatttctagtttggtaaatagtgatagatataatctacattttttttaaagaaacagttctttggggtcctcggtaatttttaagagtgtaacagggtcctcagatttaaaaagcttcactgttctaataaaggtctacctacctatttagtctggtagttactgatcgactccaaagacaattaggtaaattcaggcagtcagggcttccctttctgggagcagagctgaactacatgaactcctgaggttctgcctaagccaggacagcatgtttctaagggaaatgaattgatattactaccccggggtgagcagtacagggattaaactcgaagtgttcccccaaagcctcaggcgcacacacacagacacaagggccgaatgtgacattgaaggtcttcaggtaggacatgcaccctggcattagaaagtaagctccactgcttaagatagaggactccctttggccagtacccaaacgtgtgtcaagagtcaaaggcatgatgaataggattgcaatttgcaccttatacctggacacaaattcagaatgcaaagacgagaataagatggaggagaggactcctggtctttaaacatttcttcagaattctcccttttatgggatatatggcttgtgtgtaggatggacttaaatcgattatatctcagagtctgaaaaagcgagttcattatccaaaaataatgttttattgactctgttcatgctcactggtcatttccatgggcttcctccttctccatatgtccctgataagtacagccatgcgctcaggccagttcccattgcaaatataccacgaggccccctgaagtcaggtgggcctctcacttttctttaaagcccacaaccttactccttctcccctcagggcaggggcaagggcctacaggtgacatcacaccccagggaaaggtgactggcattaggtgtatactgaggtcagcagggtatactgaggcaaaaatgaaagcctgttgagtgtttcacccagtgtgcctgccactgggaaaacataaagaaactcttcacaaaaggtttggggaatctgtggacagactttcagaataggaaacctggcttccttccacagcacatttaatattagtaatgccaagttcatctacaagtaaaactcaacatgtacaagaagtaatgagttatttcttcaccaaatagagaagcctaaacccagatccctgaaagcttcttaacacttccaccagtggagagctaatcgcactgataataatatgaaaacacacaaactgctttaacaaacacaagtagctcctccaagcacgtatttattatcctccaagagaaactagaataattttgcatagtcaataacaaactatacttttagtgatttcctttgtatagaaagatggtgtttaagatcttaatgtgctgagggagtttggctgcaaacacctacaaatggatcttaggagtggatcaaatggtgaggagatgttcattttaccattttatttcactaaagcattattcattcacttgtcacaacattttgagatacatttagtctaaatgattgtggatacaagatcattgtggcttttagtgtagttaattacacaatacaattaatgctgtgttgcaattcaaggcttagatccaggtccctgttggagatgtaaatcagtgcacatctgacatcctaacatctctggggctttctctcaccattggcggaccttccctttgagtgagtcccttcctttgcatgctaatcctcagtgcatgaacgcaaagagatctgccttcctgttcctatgctgactggctcctttctcagaaaattctccttcatgtctgggaaggtcatacagcccttagtatctggggtcccagtggcaagagcattgtttgatgctggctaaaggaaacagaaaaggtctgtacatggaaaaggttgtagttgcaaaaaatcacccactaagtaatcaatcaaatactgcccggtaaatctgatcagtggctctgtgattagtcccaagtgacctaaaaacactataaagttgatctggtctgaggtagctcaaaagatgactttggccacagttgccacatgactgtgttgcaagacaatcaaagcatttaaacaaacctcagcaatgttaacaatacatgacctggaaaaaatacaaacttcctacacagaccattttgcatgatcaaatgctataaaattgcaagtaccagagtagagattagcaattcctatataataaatttaatgtgcctaatgacttctgttgaaagtgctaaaattgctacaaattttttttcattctgttgccttgtcacaagggtcttcttccatttctgtgaaaaccctgtaaccattttaacaaggagaacttcgtttatagttgcaatgtagaaaacgctacatctttcagcacttaaaagtttaaaaggaactttattttaaccataggaaagtgagatagatggaagttcaagcagtaatacaaatgcagttttaagaacttatttccaagtaccttgctttcgcaatctgtgcaaattataaaccttgaaagtgggacaagatcttggagaggatctaggctggccacacctcttcattttacagatgaggaaaatgaggcagacaaagatgaagtgagtctcccaggccacccacgcagggagtgagagtggcaaaaccagacctagaattcattgcttctagctcccagcctggcacttccccgccacacctgatcacctgctttcttgttaattgcatctttgctggcatttgttctctcagaagtctctcgagttccaaaaatcctgcatgtcctgaagtctccccttgaagatatcaacatatcctgcatggtttgttcaatcgacacaaaacttcttccctatgattttcctacttgaagaagcccttgttccctttctgccacttatgttgtaaactcttggtatgatgttgctttcatctagtaagtattaactgagtacctaatttgtgtcagggtaagcattaagaaaaggtgaaaacgacatagcccctgcctccaaggagctgtcagttagtggtatgatgactgttttaagtgttttgatgagcacccaagtcactatgggatccccaggagtgacagaccccccatactagaaacctcagtgacacctcctcagagacagtgacaactgagtaagtcacattaaaggtgagtcctacaggataagtaggagttagccttgcaaaaacgtgggacagggagaactgactcaattcagagaggccccagtgaatggagacgcatgtactgggctgggggtagggccgtgctcacttctctagacttatagcttgtcactggtctttgtatgaagatttcctaagttttttatgcatctgagccaatggtcctcacattttttgtctttagaccatttaggtgagaaaaaagtcctgtgggtaggatatatacatcccactttgcctgggacaatcctggtttatgtctgttgtcttgacattgataacagtgccccgtttactctcaaacatatcctgatttgaacaatatatgttcattttacttatagaccatcaaccacactcttcacccacacatcacgggcgtgcatatttaaacagagctatgagtatagttttttcatcccttaaaaccttaacttttggccgggtacagtggctcacacctgtaatcccagcactttgggaggccaaggcgggcagatcacttgaggtcaggagttcgagaccagcctggccaacatggtgaaaccctgtgtctaccaaaaatatagaaattagccgggcgtggtggcacgtgcctgtcatcccagctacttgggaggctgagacagaaaaatcacttgaacctgggagggtgaggttgcggtgagccaagatcgtgccactgcactccatcctgggtgacaaagcaagactccatctcaagaaaaaaaaaaaaaaaactacgtttttactgtgtcagagtatcgtagatatcatttagcctggcctgcctcattttaaagatggaaagacatggtgaaaaacatctctcaagtatttggtataaccagtccttagggaatgccatgagaaaccttgcctattataatatcagtaatggaatgccaaaaaacacaacctctgttgtccacattctaagtctttgaggagcaaaggatgtgcaggattaagaaaataggatattttgaagtttctgcaatgtgaaagactatgaggactaaacgaagtgattaagtgaatcaatgtatatgaaaagtgctttgtgggcaagaaagtacaatacagctattagtaattgctttaatttcccatggcaggggggcgtctgctttgctctgaagcatcatagctgctcctgtctctttagaagcctgatcttgaccactgacccagcccactgttgccaagcagtaaacttacagccagactcagccacaccagaatggcccaaatcgctgagactgcatagccccaaagtcaatccacaacccagagggattgaagtggcacaattcaaggcgttaggaagcaaagatataaacctgctgactcatttcctttggagactcctttcctcagacaggcttcatctccacccatgaaggaactcatcgaacacttacactaactgacagggactgaggtttggaacccattatcgaaaacctcccgggagatgtaggggatgaaaaagatggtaacagaacccacggtgttgtggaaacatcccgagctgcaagtgtgaaggcctgatttgatctcagcggtgctacttacaagctgtgtgcctttggacaccagatcacctctgtgagttctgctcctcatctacagaatgagggggctgggctgaaatatgtctaagagcccccagctctgaggatctggttacaagtctctggaatagcctggcatgttggtttttagtatgatatgcttaaatgaagccataagaaaaagtgtacagcatatgagtaagaaactacaagcagctattacaatttataagtccaagaatatgcatctgaaatgtgtaacttgtttaaagttatgctgaaacccagaaaactgaagggagaataatttccgcttagaagaatgcagttgcaagtagatgaacagcgatctgatgcttaaaaatgccaaaaagaagggcagtccatatgcctaaatctcagccttacaacgtcagccagggagaagagccagccagacccaccaatacttctcaactttccccagtttgcgggtaccacaccctttctgaaactagcattgcaaaattcattctgagttccaaagtaggcctgaaaatgtcctcagaagtattttctcctccgtgaatcacggttgcacccctctaccaccaaaacctccgagccacgtgacttcttcatattcttaccttgtatggttaagtgattttactccctctgcagtgttcctggtgctcaaagggttgggagctggaaatactgccaacatgggggatgagaggcgacagtactcaacccaacagcccgtctttgaaaacagccccaaaatggacctaagtccattttgttcaccatctcaaatcagctcaaataacgatatttatgaatttccctgaaaaaaggaagtcaccagccctgctaccccaccttgcttacctggagtcacagttatcctggaaaatgcgtggaaaaggaacaggcaagcgaggagcacaaagacctggatgtggaggcgaccgtgtctgggcagaagcagcggtggctcacctgggcagcaccgccacgcccactgccagcccagctccacgccccgccccgccccgcctcggcggcactcctctcctactcaagcctcttggcagcttgtccacaattgaaagaaatgattcaggctgaagttactgttgtctgcacagcttccaaaaggcctccaacatgttcgggcaggaaggggctgtgagttacatgcatacgtacagacatgcgtacggcaatcctctcggcccacgcaggaccggaaggtgaaatattcgatgaaataaaagtaatgtgtgatgatagtaacactacaaatttctcagacacgttggtggcacaaaaagtactctgatctccattctttttgtgtaaactgcagcagctcattctgctagatgccaagagaggtagctgcccattaaacagaaagacaatcaaaaaagaaggaatggatatatgtataaacacagtgcctacctaaaaattaggtactattagcaaaatatttactaccaaattggtaggagatattgtttaatgggtggcgcaggaagtttctttttaaaatcctgtgattaggattactcaggcctggcgcggtggctcacgcctgtaatcccagcatttggggaggttgacgtgagcggattgcttgagcccaggagtttgagaccaacctgggcaacatggtgagaccccatctctacaaaaaatgtaaaacaatagcctagtgtggtgatgcatgcctgtggtcccagttacttggaaagctgagacgagaggatcacttgagcctgggaggtcaaagctgcagtgagccgtgagctaaccactgtacttcagcctgggtgacagagcaaaagaaacaaaaagaaaaaggagtacgcagctctgctctgaaatctcttcgtggagcctgttcttgtcctcctgtcttcccacagcttcttcatttggcgggacctactcccttccagccgaatcagtctcaggaaaggacctgaaacggagctggttgcttctctgctgtgcttatctagaattccctattgtacatttactacattgtttcataataatctcttacattctcctatatgtgactacaacaatgttaaaggtaagtgccaaacttcattcatttttataacaccaaagcttggtacagacctgatgtacagtatgcagtcaataagtgcttgttgagtaatgaataagagcaactcgctatattaactgactaaactaagattgataacagcttcccctcccccatgtcctgggtattttaatgttaaccagaatcaaagtcataaactaagtgaactccaaaaacagaattttaggcatcagtggagcaagtggagggaaggtcataggtgaggaggtgtggaaggatgcttcttaaaaattctattatccagctgtaggagggaaaatgagaatttgggagcagagtcataaatttgcaaactaagtctaaccactcattgcttgagaaatcctgagcaaattgcttaatccctttatcttcagattcctcatctgtaaaatgagatctatatatagttctcatttgtcaataagatcgataaaatgagatatagacagagatggatgaagagacaattcttacatactttctgacacatagcatgtgcttcctaatgatggcaattagtaccactttgcccattggttaggtaggctcggggaatagtggacaaaagactggagcatgttattgacattgaattcaccacatttattgaatacctgcttcgtgcttgctactgtggtctacagatttcaagcgacttgcatttaaatggtagagcctctctattctcctttttgaagttttaattccctctaaaacactcctgttcagtgcttgctcaaccggggcagaaacatttccaatgacaggaattcaacaatacccaaggaagttctagcaaagtgaaatgcctttgggtgattctaactgggtgaaaattagaggcaccattcgactggggctataagacatgttccctctccccaaagggtacagtaggaagacaagaaacaaaagaaagtatctggaggcatgtaataagggacttaagagaggtgcaaatgacaaaagtagttcagagatgggtgtgaccttttcagtctggctatgactggggaaggatcatggaggcagcatcattggacatcaggagaccatttaagcctgagaacggaggtccagagctgggatgatacaaggtatattggacagatatgttaacaaaagattaaacagaacatttcctgtcaaaagctttcacttgttgaagtatctctggaggtcagaccctgtacgtgaatgttctcaccctctcattgaacccaagtaaggcaaggactcacaagtctcaggtgtaacatcattgacaaaacacactgttgatttaggcaaaattgcaggaaaaaaaaaagtggttcccattcagtggaaagagtattaaaactgtgattctatttgactgagaagacccatttcccagtaatattcttttccacggcagccaaaattttaagttctttagaattctacctaaaaagacactagaaaacagaaaagtgggagaggatggagttatacaagcagttcacattttttaaattacagaatttcaaactagtttctggagaacatgcctgctgattaattttaggaaagagtggcctcaataaagtcttctgcattcaataggtttctactctgcttccctgttttaactggacattttgattggagtctgtgattgactgaataagcattttttgagtgtgtcagaccctgggcaagacccagaataagacctaactatggatctcaagccgactacagtttagctttgcatttctataagtcagatacctacactaattgttatactgtaaaaaaaaaaaaaaaaaaaaaaaaaaaacatacatcctgaaggaaatgcctggaaagaacaaagttgtcatgtcaattatgttaacaagtggacttagaagcatcagacttataagaaaaaaggttctactcatactaataactcagagagcaacaacataaaaataacaatatggtgttattatcctgttataatcttcagtctcttgcctcatgaaaagctttttatgtgggcccatgaatagtcaactccagagtatttttgatctcccttcttcttgatgaactttgaacctataagaagcagatataaggccagattttatagttttctatatgatatactatacaattcacttattatgtttactgttgatggcctccttcagctgaaatctaagcagatttttttggtctgtttttttcactgatgtagtccaagaacttagaatagtatctggcacatagtgggtacttagcacatagtgggtagagaatgaatgagtgggaaataaccctacccgacaggaattcaactaaggatgaattcaacccaaaatttgaagtcagtttgacatttccttaaataccagctacctttcctccagttctctttgtatatgaagaccagtacatctgattcatcccaaacactttacatttgtaaaataaatgattcttttttttttttttttttttttttttttttttttttttttgagacggagtctcgctctgtcgcccaggctggagtgcagtggcacgatctcggctcactgcaagctccacctcctgggttcatgccattctcctgcctcagcctcccaagtagctgggactacaggcgcccgccaccatgcccagctaattttttttttattttattttttagtagagacggggtttcaccttgttagccaggatgatcttgatctcctgaccttgtgacccacctgcctcagactcccaaagtgctgggattacaggcgtaagccaccgcacccaaccaaataaatgatttatttaaaaaaatttagtgacaaagaatacacctgtttgtaggaaaaagcatttgctctataatttcaaaaataatccataatgttttcccctctctttatttgccacaaaaaccattttattgactatatatttaaaagagtagattttttggaggggagatacatagctcaaagaatgaattattcattcattcattatacaattgtatgaagcaataacttcctctagttcaacacaagtaatcattggactaaatatttaataacctaggagactgttttgttggtgctttttcttacctataggttgaagctttgcaaatattatacttgattactcagcatcgaggctgagggatgatttgacacacccagccactcccaggaacaaatgaaaggagctttgttctagcatgtgcctctcgctttctctctctctctctctctctgtctcgctctcgctctcactcaatctctctcttttcctaagagaagtttcagccacaaattctcagcattctccccggattcctacaaatcatcaagtgatttttttcttcactaataaaggtgattcccactaattcacatgatgcctctcccatacaatagtggaatcatattagctgtccacgtttccagccattcacagttgactataaaggatcctaactagtcactgtggactattatgtcttttcacttgtggagaaactgagtcagggaagataaagtgactgctttaaagtttctgactgagatggaaaaaaaactattttaaaagccccagatttataattctttttcctaactactctattttgaggatttatttcatactttttgtcttttcaacttctggtgtttgtctagaagaaattttatattaaatgataaactgtactatattacagaaaacaggctgtgtgaaattttctaagaagcaaacttaagagaaaaaaaaaaagaccacagtgaaaaaaaatagagttaaacaggaccccagagttaaaccaaaaccagatagtagaagtggcacaatttgcctctaaaatgcttcgttaaccaggcgcggtggctcacacctgtaattctaacactttggaaggccaacacaggaggatcacttgtgttcagagtctgagaccagcctgggcaacacagcaacacacagtctctattaaaaatatatatgaataaataaaatgcttaatactatgcgtaaaggcatatctgagcaaaaaattgagtgacaaatcccttaggccactgcactccaacgtaggtgacaagagcgaaattccgtctcaaaaaaaaattattttatatattttcttcaagtcctctaaatatctaatttgctaatacaaaattaagcaacccttaagtgctttataacaagaagcagaagctcctaatttctactggcttattgcaacctctgccttccgggttcaagggattctcctgcctcagtctcccaagtagctgggactacaggcatgtgccaccatgcccagctaatttttgtatttttagtagagacggggttttgccatgttagccaggctggtctcaaactcctgacctcaggtgatccgcccggctggggctcccaaagtgctgggattgcaggtgtgagccatcgcgcctggcctaaacaattttaataatagttatttctggctggcaaaattaaagattatttttccatatccttggcatatcttgcaaattttcaacaatcaccatatatcatttcttatgattaaaaagttgcatttcttaagcagtggaaattccagagcatctttgtgaggcataagacctctcagctgcacaacagaagctgacgtcgtcctgagatgagcacgtcatcttggcacaccacccctaccgccacccacaccccaggtgagccgggttgaggagagcccaagcccggggctctggggtgctcaggagcacctccgagagtgtcagcccccgcaggggagagctgctcaaatgggaacacgcctgacttctttctccctcctcctcccttctcctcctctgtaccatcagccagtgtgctgactcagttgcaggccatgatctctgccttgataggtgatgcaactgaaatgtgccaaggagaagcgcagctcttcgctaaagcaagcttgcttccactaagtccaaaccttgtttccaaatggtgaagaacatacacccacagcgccttgtgtgagcattttttaaagtcatacgaggaagaccttttatacatgctttgcagtaacactttatgtaaggtctattttcatcccagtttataaatgaaaaggaaaaacatgcagatgcctagggctattgagtaacttcccccaggtcacaacgttagtgaatggtagaacccgatttaaatccaggtagcattcttaacaaacatactatatccacgtgttaaacgttatattcttgaccctaatctgagattaaataagcctattcctgtatcaaatataaaaaatacagccgtgtacagtggcttatgcctgtaatcccagcactttgggaggccgaggagggtggattgcttgaggtcaagagttcaagaccagcctggccaacatggtgaaaccccgtctctactaaaaatacaaaacttaactgggcgtggtggcgggtgcctgtaatcccagctacttgggaggctgaggcaggagagtcatttgaacctgggaagaggtgagattgcagtccatcaagatagcactactgcactccagcctgggcaacagagtgagactctgtctctaaaaaaataaaaataaaaaataaatatatatatacatacacacacacacacacacacaaaatgtataaatatataaaacatataaacatgttatatatgtatattatataaaatatataaacatgtgatatatgcatattatataaaatatataaacatgtgatatatgcatattatataaaatatatgaatatgtgatatgtgcatattatataaaatatatgaatatgtgatatgtgtatattatataaaatatatgaatatgtgatatgtgtatattatataaaatatatgaatatgtgctatgtgtatattatataaaatatatgaatatgtgctatgtgtatattatataaaatatatgaatatgtgctatgtgtatattatataaaatatatgaatatgtgctatgtgtatattatataaaatatatgaatatgtgatatgtgtatattatataaaatatatgaatatgtgatatgtgtatattatataaaatatatgaatatgtgatatgtgtatattatataaaatatataaatatgtgatatgtgtatattatataaaatatataaatatataaaatttatatatgtatattatataaaatatataaaatttatatatattatatgaaatataaaatatataaaatttatatatgtatattatataaaatttatatatgtatattatataaaatatataaaatttatataagtatattatataaaatatataaatatataaaatttatatatgtatattatataaaatatataaaatttatatatgtatattatataaaatatataactatataaaacatatatttatattatataaaatatataactatatatgtttatatataatagcaattatgaaatatatttataattgttatatagaaatatattgatatgaaatactttttcctctaataagcacttagttctatgtgatgtcaggatccaattcaagaggagagagaatgcaggaatttacaggcctcagaaacacaaagtcagctggctttacttggaaagggaggaattttgttttaattttttagtttttatttttctgggtacattgtaggtgtacatatttatggaatacatgagatattttattacaggcatgcaatgtgtaataatcacatcatggagaatggagtatccatcccctcaaacatttattctttgtgttacaaataatccaattatactcttttagtcatttttaaatgtacaattaaattattattgactatagtcaccctgttgtgctgtcaaatgctaggtcttattcattctttctagttatttcttgtacacattaaccatccccatcacctccccaccccatgggaagggaggacattttcatgaagtcttcgaaggtcatttggcaggggcgggggagatgtatgaatcagcctgtgctaggtatgtaaagcactgagctagactctgcagatgagaactctgtcccggtctctgcctcctaaaatgggatttaagagtgagtccttctatccagcaatttcaatttctcccagacatggaggactctgagattcacttgtagctccaagagtgccccccatagaaacttgagaacagacacttcttcatgagtcccagtctggacttctgtctcttcactcactcccacatatgaggggacttcaaaaattcatggaaaatttgaattataaagagaaaaattaaaaatataaactccgtttctcaacgtaagctgcatcaagttcaagacacttttgtaggtggtaatatcagccatgtagtccatctctgaggaaagcagagtcctgggaatttgtgtcaatgcagtcccttttttattattgctgaagaaaaatggctgccctttaaagatttttgttgttgttgttgttgttgttttacaattaggaaacaaaaagaagtcagaaggagccaaattagaactgtaaggtggatgcctaatgatttcccacggaaactctcgcacacgtcccctcatctgatgagaggaacaaactggagcattgtcatggtagagaagggctctctactgaagctttctctggtgtttaaataacattttggctgattttctcagaatgctctcaaaataaggagatgtaatgttccttggctctccagaaagtcaacaagcaaaatgcattgagtatcccagaaaaccgttgcgataacctttgctcctgaccagtccactttcgctggcccacttctgtctcttggtagccattgctgtgatggtgctttgcattcagggtcatactggtaaagccatgttgcacttcctgtaacagttcttcaaagaatgcttcaggatcttgatcccacttgtttaaaacttcaattgaaagctctcctcttgtctgcagctgatctggctgtaacagttttggcacccatcgagtagaaagtttgctcagctttaatttttcaatcagaattatgtatgctgaagcacctgagatgtctacggtgttagctattgtttgtgctgttaatcattagtcctcttcaattagggcacaaacaaggtgaatttttttcttcacaatcttcaatatcttctcatccctacttaaaatgagttatctatttgtaaactgctgatttctttagggcattgtctccgtaaacttttcacagagcatcagtgatttcaccattcttgcactcaagcttcaccacaaatttgatgtttgctcttgtttcaattttagcagaattcacattgctttgataggggctcttttcaaactggtatctttcttagcacttcaaactagatcctgtttagacatgttgtaactagttagtatgagtttattttgatacaaaaaaattgaaatccatgcattgtttttgcatgatacacatttttgatgaactttttgaagacccctttatattatttgcattcatgcctggttcctgtctagaccctgagccatggggaggccagggaccacagtttatctgtacatccctactccctctcctagaactcacaaagttcttttcacactacacattaaataaacttgtcctagtctagtagtagaaaccaatcaattacctctcacaatgtcatagtgcagacaatgattgttaggacaggaggtggtgtccatgatagatggtgttgctattttaatatcttgaattataaagaaagaattaaacattacagcaagtaaatcaaaggtttatttttttatccaactagataaagatccttatgctagtggtccttcaacatcactgcacatcagaatcaagaaggaataatgtgtgtggaggacaggtgaagaagtacaatcaaatttcacatttccagaccccaatcctcagagatctgggatttagaggtctagggtgagacccaggaatgtgaatccctttgggtggttcagaactggttgttcacagaccacactttcagaatcacaagcttctggcaggttctgcactaaccacagttggtccaatggtcagcgctgattctagcatgagactggctggttcccactctgccattaatgacaccatggccttgaacaaattagtacatttcactttgcctcagtcctttcgtctgtaaaatggaggtgacattagcaattcctcatagggttataacaaggacacaatgagataatacatgctaaaggcttagaatattgcctgccaccagtaaatgttcaaaaaatgttaactgtcatgatttttgtactctaaaggctgtagtgaagttacaaacctcagagagattggttttacctcaatagtagggatagacagaaaattttttgtctgtatttgtattaatatatttcaagattttttaattggaagaaaaactgatagtctttaaagcttgagaagaattaagaatcattaaccatatcacattcacacacacacacacacacacacacaatttatgtgaagttttcactttctacctttgggttatggtgtcttataacatgaaaaacaagaataaaatgaaatttactcatagtgagaaaggagattaagatttcaaagagtggagtatacatttaatagttcaaattaaataaatatcattaatatgaccaacaacacatattagcataattatggtgctttgcagtttattagttgttattgtttacccagccttttcttcaaagcaattatatatgtattatctctttcaaacctcacaataaatcagtcagttatgtattatgatctccattttacaaatgagaaaagtgatattagaaatttaagtaattactagtaagaaataaagtcaaagtcacattcagaactcagtgagatggtacaaataccatactgccttccattgtctaaaaaaaaaaaaagactggaggccgggtgtggtggctaatgcctataatcccagcactttgggaagccgaggcagacgaatcacttgaggtccagagttcgagatgagcctgggcaacatggtgaaaccccgtctctactaaaaatacaaaacttagctgggcatggtggcatgcacctgtaatcccagctactcaggaggctgaggcaggagaatcacttgaacctgggaggcagaggctgcagtgagctgagatcacatcactgcactccagccttggcaacagagcaagaccttgtctcaaaaaaaaaaaaaaaaaaaaagaatggaagaaaatgaatgaaccaaaggtaattctctcaagatttattatcagtttccttttcaaaggaggttttgaaggggaagcccaaagactcagcacgaagccagaccaccatgtagactcacttggtccacaccatgctcacccccctgaggagagcatgactggtgtccatggtagatgccttcctggagtccctcatcatggagcatacccctaactgaattatatatgtcacttgctaggatggcaaagatggttcattttctcttcttgtgtcacataatgtgtccttgatattagtcataaacctacttttcacaagctcttgtatttcaggagttgatgagcaaaccagtgtttccctactgtcatcagtcacgacacgaagatatcattagccagggaggaaagagccagaggaaagtggggcatgtctgagtggattcatggcaggaggaggctgtgtaagagggacaggacctctcccattccattttccctgtccaaacgattacaagaatgtctctaagtagctgagcaaccatagaatcaatgctagcttgaagttaaggaatgagaaaaactaaaatgaaatgcaattcctttaaattaaaaaaagccaattaataggttattagcacatgagttaagaattaaatagagaggagaggcataaggtgcaaactaaacagagatttctcgcccagtaatgggaaaactgacacctcatgccagaaaatgagcacaaagagcaatgtggcatttgagtcatgaactaaaagtctacagtacatggaaggtgttagcctttcttttcaaggaggagataaattgccaagtcatcataaagctcaccaaatgggttttagtctaggagatgttgttaggtaacaaataagaaaaatctaggccaggcacagtggctcacacctgtaatcccagcattttgagaggcagaggtgggagaaatgctttagaccaggggttcaagaccaacccgagcaacataatgagaccccatctttacaaaaaatttaaaaattagctgggtgtggtagcacatgcctgtaatcctagcactttgggaggccaaggtgggaggatcacttgagcccaggaggttacagtgagccatgatcatgccttgccctccagcctgggagacagtgcaagaccttgtctctaaaaacaaagaaacacaaatgaatgtcagaaagaggtttccaggtttcttccttttggaaacaccttctattgattgaaggtttccccacaccagcaccacctacagtgggtttggtgctgatgatgcaaacttacttgaggaccaggtgattatgggctgttagggcaattgttctgggtggagaacacaagttttgtatgttccagctccaagatgttgaaattattttaacttcaacatctctacagtggaaaagtcaagtaccagcccagatgttcagaagactgagtcccaagaattatatgatctcttgtttgattcaggctcacaattacctggagtctttcagcacagactatgttccaagcttagtataaatattaatattatctttgctgtatataagaggtaatcagtgtaaactaaattgttctaacccggaggaaaaagaaaacaactgtcatcttccaactgcctgctgtacagtaattgagaagtctgaatctagtgaggaggttcctgtccttgtcacaggacagagatataccgttgcaaattgtgtatggtgcgctaacaaacatccacacatcacctgccacaggtcaggcactacagcatcaaatacttcattgataatgcccatgccacagcgtgtcttcaagtctccacacactgcacaactcctggcatcagaacagagtcagagatccccagttcccttttctctggctctccctggacctcccttcctcaggatgaaattaaaaatcaagccacatataaattacaatctcatttctcatggtgacgccctcttagctcggggcaggtggctttcatgccttctttaagtctccattttcttatctttaaaatgaagttaataacacctacttctttggggagatgggagaaataattagccctgaaatgctttgaagatgaaaagtgccacattattctttgtgctaattttccggcataaggtgcctaatttcccattagcattggcatgttcttcaggaaaaccaaggatgagactctactaaaagagtttgtatgattaattattggcaaatggaccagcatcatcatatcgtttttgcattctcctactatcttaaagaacacaaccatccaggcacagtggctcacgcctataatcccagcactttgggaggctgaggtggatggatcacttgaggtcaggagttcaagaccagaccagcctggccaacatggtgaatcccgtctccactaaaaatacaaaaattagctgggcatggtggcatgcacctgtaaccccagctactcaggaggctgaggcaggagaatcacttgaacctgcgaagcagacattgcagtgagccgagatcacaccactacactccagcctagacgacagagccagactctgtctcaaaaagaaaaaaaagaacatcatctcctaaccaacttattgttttgaaaaccagtgcaaaatagaaagagcccaacatttgttttgctttttctctacaaatcttaaataactaaatagtagataaggagaagttttctttctgtaggtatatttcagctaataaatatggaagaaatgataggaatacaacccctaatgaattcatatattttaggctatacctaaaatattttaggctgataccatctcaaaaggagacacaatcagatattgtctattttttggtggaagctcacagcattgtctttgaagtagtctaagcaaaacaaattgaacccaaatatgatcaggtttctggatctgactacaaatttcaggaaatataaagaacagaggagcactttaaactatactacaagattcagtcaaaaaaaattcagattataggaaactttataagcatacaacctgttttcttcaacaattaaacttcaaggacaaaaaagagttcaaaggggaacttatacattcaactaaatttatgagatgtatcaaatgatcacaagtatttggatcttgcttcaccctagccataaaacaaattaatgagaagaccaaggagatttattgatgatactaataagctgatataattttttcaagtgtaataatgatatcagagttatgatttcttaaaatcctcctcgatttaagataactactaatattttttacagataaagtgagggttcataaagtattttctctgtgtttgaaatgtttcataacaaaagtttaaaaaggaaaaaaaaggccaggcctggtggctcatgcctgtcatcccagcagtttgggaggctgaggcaggcagatcacttgagcccggagtttgagaccagcctgggcaacatggcgaaaccctgtctctacaaaaaacatcaaagttagcagggtatggtggcatctgcttgtagtcccgattactgaggagactgagatgggagagtcacttgagcccaggagactgagactgcagtgctccatgatcacgccactgcattccagactaagcagcagagcaagatcctgtctcaaaaaagagagagagagaaaagaaattgcaatttttaaaaaaaaaggaagatgtaaacagcctctggatgtaagaaagggaagagattgctagataaaatggattatttttttctaggcaggtcattttaccaattaaggaaaggcttcaaggtgagggcaccagcaagaccagaactagacagagggcaagggggaagaagaaaaccaatctgcaagagaaatagtttgaagcagtcaagaaagagtgttaggtttttattagacaccactcgtaggtcaagtgttggatagcggttgagagtacaggttctggactcaggtttaatacttggcttcacacttcctagctatgagaacctgggccaattgctttcctctctgtgccttacttttttcatttttaatacaggaatgatagtagtacctacctcatagggtagttatgagaacgaaataatacaaataaagtgctcggacttagtttagcatattgtaagtgcatgataaaagttattattgtctgtaaatttaaagtcttatcagctgatgctcaacatcattgattatcagggaaatataaattgaaaccataattactctacaatcttaattgctaaagttaaaacaactgggcacataaactattggcaagaatgtggaggaactggaactcttatacattgctgatgggaatgcaaaatggtatagttactttagaaagcaatttggcagtttcttgtaaataaaaatatacccttagcataaaatccagcagttttgcccaagagacatgaaaacatatgttcacacaaaaacatgtacaaacatattcataacagcttatttttaataccaaaaaaagaaagaaaacaacacaaatgtctatcaacagataaacaaatcttagtatgtccatacagtagaatgctactttaatttttttaatgaacaatgaaacaaaaaaaggaaaacatgtaatgatatgtttacatattatatatagtaatatacatgaatctcaaaatggtatactgaattaaagaagttggacataaaagagtacagactgtaccatttcatttgcacaaaactgtaaacaagataagtctcatctaaaataacaaaaagagatcagaggttacctaagaccaggagtgagattgggaaagagcaaagagaatcttttaggatgatggaaatgttccatatcttcattgaagtggtggatacatggaagcatggatttgtcaaaatttgctagactgcacacctaacgtggtgcattttattatgtgtacattgtacctcaaaaaagctgatttttagaaaatacaggccaggcatggtggctcacacctgtaatcccagcactttgggaagccaaggcaggtgaataacttgagatcaagaattcaagaccagcctggctaacatggtgaagccccatctctactaaaaatacaaaaattagccaggtgaggtggcacacctgtaatctcagctactcgggaggctgaagcaggagaattgcttgaacccagaaggtggaggctgcagcgagccaagattgcaccactgcactccagcctgggtgacagagtgagactccgtctcaaagttaattaattaattaaaataaaaaatccaaccaggtaaactaaatgaatgtgtgaatctgtattggatcctgaaccagaaaaagggaggaaagaaggaagagaaaaaaatagtttttctttagttatataggacattattggaacaacagtttgagcaaccttagagtaagtgagattttaaactttagtggtgacttgacttcacttatacagcaatgcagtttaattaagaacatgaaatcaaatgttttgaaccttagatcaaatattcaaataagcagagccccagaactggcctggaaagaatcatagggtcccactgagacaagaaactgggtggtctactggtcagggtctgaagaactgcctggtccaataagtatattcagggatcagtcattttcattcaaagcccagctcaggaggtcaagctttctcctccatcctcctacccccatgcctgcttcacttgcctcacagaagtggcaagaggaagctctggacctggcagatgagttaccaaagcaatggacttttagaagagatgttatggtttggctgtgtccccacccaaatctcatcttgaattgtagttcccataatccccacatgttgtggggagggacccggtgggaggtaattgaatcatgggggcagttacctctatgctgctttcacaatagtgagtgagttcgcacaagatctgatagttttacaaggggctttttcccctcttaacttatacttctccttgctgccaccatgtgaagaagcacatgtttgcttcaccttctgccatgattgtaagtttcctgaggcctccccagccatgctgaactgtgagtcaattaaacctctttcctttataaattacccagtctcaggtatgtctttattagcatgtgaaaacggactaacacaaaaaccaagagtatccattgcttatagaatatttctggttttctctgttttcttatacttccaaatgtgcttcaactaatatatagagattttgtgattttgtttttggttttttttttttttgagacggagtctcgctctgttgcccaggctggagtgcagtggcgcaatctcggctcaccgcaagctccgcctcccaggtttacaccattctcctgcctcagcctcccgagtagctgggactacaggcgcctgccaccacacccagctaatttttgtatatttagtagagacggggtttcaccttgttagccaggatggtctcaatcccctgatctcgtgatccacctgcctcggcctcccaaagttctgggattacaggcatgagccactgtgcccagccaattttgtgatttttttaaaaagtgccaacagcacatatgacaggaagagaaaccaatacttttatttcaagaagatagtctagataagaacatatgcattataattattaactatgatttaatattaattttattttaaccaaaaacacctacaggtgttataaaaatggggggtggggggaaaccatgtaaactaggaggcaaacctacgggaatcctttgtgcatatgaaaataagttttctcagactcctctgagacaaatacaaatgattatgtattgggttgagcacattagggaatgatcttttttttttttttttttagatggagtctcactctgtcacccaggctggagtgcagtggcactatctcagctcactggaacctctgcctcccagattcaagcaattctcctgcctcagcctcccaagtagccagcatgcctggctaatttttatatttttagtagagatggagtttccccatgttggccaggctggtcacgaactcctttcctcaagtgacccacccacctcggcctcccaaagagctgggattacaggcgtgagccaccacgcccggctgtaagcctcatcttttacgatgttatggttagaatgattaaatgattgccagttatgaaaggtctgtgggtgtgataagtcaatggtattgtaagcctagataagaaaaggagtggcagccactgtgactactcatggattctcagtatctcctctgatctagaacatgtttgttaacacctaaaacaccattttatttttgtgtaagctgtgattttcacccaaaacatgttggataatcttacctatagccaaaatgtatagcaattcataacacttatataaatgttcaaatatgaaagaaaattctggaatgatgaaaagtattttgaaaatatatatcagaattgtctgtcacacacagaacaacacttgagttaaccagtataatacaaaaatataaaattacggttgaaggaaccacttagggatatggtagttatctaaaacatggagtaaacgagatggatgtatacccatgaaatctatcaaaaaagtgtccattgtctcatcttttctatccaaaatatagggagctaatttagttcacagtcaaaacctaagaattgatagaattttataagaaactgttttcacatccacatcccgataatcttcatgaagaagaaatattttttcacaactgtaggagcaagaaaaaatattcttgcctcagaaggatctcccacaatgtctaatatgtcaaacatttgatctttagtaccaacaattaaattataaaaactgttttagggtatattctgaagacttttccaggcagttctatattttcaaatgtgtcatcggattttcttacatgtttaatgctcaccattataagcttgccagctacttgtaggttcaggtttatttaatgctaattatcagaagtactgctatgccaaatacaaacaagtagtcattcgaaacctctaggacttgaatatggtgcagtagctcacacctgtaatgccagcactttgggaagccgaggcagaaggatcgcttgagcccaggagtttgagaccatactgggcaacatagcaagactccatttccactaaaaacttaaaaaattagctggtcatggtagtacgtgcctttagtcccagccgctcaggaggctgagatgggaacattgcttgagcccaggagttcgtggcttcagtgagctaggatcgtgccgctgcacccttgcctgggcaacagagtgagattctgtctctaaaaaataaaaaaataggctggcgcagtggctcatgcctgtaatcactttaggaggctgaggtagacagatcacgaggtcaggagatcaagaccatcctggccaacatggtgaaaccccatctctactaaaaatacaataattaacttgtcttggtggcatgcgcctataatcccagctactcaggaggctgagacaggagaatcgcttgaacccgggagtcagaggttgcagtcagctgagatcgcaccactgcactccagtgtggcaacaaagcgagactctgtctcaaaaaacataaataaaataaaaacaaaaataaacaatcagaggtgaattaacactagcatgtaagagccctcttttaaagtgacttgacacttcagttggtcctttaaatacagaccacacagaacatcaggtagaccaatcactgtcaaaacagtgatatgatgtatttataccttttcagtgtcatatgaagtaatcccctaacaggaggtcttctcgtgggaaacagttatctagctccttgttactaaaagtgaggtccttagagaaacaggatccacatcacctgagagctgacgatgaaatgcagaaccttggacccaccccaggcctaatgaacaggaacctgctttttaacaagacccccaggtgattcattacacagtcaagtttgagaagcactgatctaaacttgtcatctggatcatgtatgaacgaaaagaaaaacaaatgaactctttacatagagttaccatatgacccagccattttgcccatctatatatgccccccaaaatgaagaatacgtccacaaaaacttgggcatgaatgcccataacagcattatctatagtagctaaaaatagaaacaggccaaatgtacatcgactgatcaatgggtgaataaaatgtggcacattcatacaatggagtattactcagccacaaaaacaaatgaagtaccgacaggtaccacagcatggatgaaacttgaaaacatcatgctaagtgaaagaagccagacacaaagccacatagtgtatgattccagtcatacaagatgcccagaacaagcaaatctatggaggcagaaagtagattagtgattgccaaagactggagtggcggtggggttggagtgaaatgagaagtgactgttaatgggtatggggcttcttttaggagtaataaaaatgtctggaattaggtagtgtggtgatggttgcacactctgtgaaaaaactttaaaaaaattaattaggccaggcgcggtggctcaagcctgtaatcccagcactttgggaggccgaggcgggcggatcacgaggtcaggagttcaagaccagcctggccaacgtagtgaaaccacatctctactaaaaatacaaaaaataaaaaaattagccaagcacggtggcatgtgcctgtaatcccagctactcgggaggctgaggcaggagaatcacttgaaccagggaagtggaggttgcagtgagccgagatcgtgccactgcactccagcttgggcaacagagtgagacttcgtctcaaaaaacaaaacaaaatgaaacaaaaaaaaccttaattatatactttaatggaaggaactttatggtatgtaaattacatctcgataaagctgctatttttaaaatatatgctttagggaaagtcagagtgatacagaaacgccagtagtgcaccagctgcaggtgggaggaaaaccgagctttgccagacagtccttgacagaatgaattgtgggctgttttagaggctctagaaaagataagaatgatacaaggtgatgctggagaccattaatggaagatggagtgggggagccagcagccattcagccatcttgttgaagctgtcactgcagaccccgtgaaggaggaaagaagaaattacactgggcacagacacatcagggagtggctgattgtgcgattatacatcacacaaacataaggcttcttctcagtagcattctagctatcattctggaatactattgaaaaatctaaaacctagaatattagtctctttttcaaactcagagtctaccttcaaaatcaaagtttttgcgtcgtgacctactgagaaaactgtaccctattaaaccttctgtgaatgcaggaaatagataagattcctctatttaattgaaaagagcccttccttcatccatgggtaaatggagccatgggtggggcagttaatggcggtgtccaaacagccccaggccctgggcgctctgtgagtaagcctgagtcaaggccacagcctctcccaagtcgtctggcagccggcgatgtggaaggggagaaaaaaaaaatcatttcttttttgaaccctcctaagtttgttgctgggacagattcctcttagcaaaacacagatgaacaagagaaaaccaagcatttttatttatgcatgccatgcccatcacgcaggagaaagcaactgtcccaaatcagtggcttagaggccttgcttaaacagtatcttatcaaagagcaataaatcttagagcagtgatgagaaacaaaatttccagtctctcaaggtgggaaaactgtgggaaaggagtaaagttggctcctagattcccctagccctgctgcagccagtttctgagctgatgagagctagggccatctccagtgaagacagaatttacttctgtctttaggtgggaaaagaagggaaacgggagaaagactttttgtccttgtgaatcactgtcttcccatcaggtaagcataaggaacctcaatatccaccctctgcattttaaccttcttcagctcaacaaccttcaatattttgcagagaaatattttcattttcttcaatgtcacaaagtaaaggaaagatgatggggccactgtcaatatccctctatagagattgtgtcagctacgaaacactgcaaagaaggagccgagggaaaagatttgggattaaatattttctttcaattttggcacatgaattgatgttccactgagattcagaacaatgattgacaatcaacttgaagaaacaagaggccaatagttctaggaagcacctgtctgggaggaactgaatggtcttcctggaaggagtctccatccctgcagcaagtggaagtcgctggtatgtatgggggagaatacatgacaataggtagctagtcagacggtgagcagggcaggagaggggcccccccaacacacacaccaggaatgtcaggcggccatcaggtgatggtcaggtcgttgttaaactgcctctctaaaataataattgtaggcaggcaattatctatctattgggagactgcctgggaaaggcaaaagaaaaaaccacactggtaatcagcagcttcccaataagatctcagaagttgggccagtgggctcaagcatgcacacgaagaggcaaaatggcggagtttaactagcatatgaccttcctctgggaacgctagactgttaagggaagaacgcttgattggtgagggaaaaacacctcaagtgagcatgtgcagaaccccagtaaatacgctgcacgtgtggcccctcccaagtgctgacaggtcactgcacatgtggacagctcatgccaagggaagaatcacaggggaagggatgcaaggccccggaagtatgtcaatgcgtaacgctgaaggaaataatatatacagtgacccatttccaagacaaagtgccttgaattggcttgttgtgggattcaggaggacgagagagacctcgggttgaaagaggagaatctttattgagtgcactcaggcccacctgactgacgtccaaaagactgggcccggaacaaagacagtacttgactttcatacacacttcatagaagggggtgggctagcttgaagcaagcttacagtggcgtgaaagcagggatacagaggcaggacaaagacaggattgccatgaccattgccaagcaacccagatgtccgttatctaggtttgcctgggcacacacaagcttatcttataaccttcgctatggtgcccaggcagctgtagttcaggcctgcttaggcttctcatgaccttcgttgtacttcttagataaaacagaatacttgaagtcactagttacagagaacaggaatctataaactcactctgtaaaacaaaggaaaatttgttttcttttccctatgttgaaggagtgctgggagagtctccagagcacattagataatattatcaaaacttttcctgggtctgggctgtgcctgttgctgcctctgggaaaagttagcctaaaacaggaaaacttatttctctttctttttaattttgtttttctttaatttcccccctcaggcttaggtcagcaaactacatagcaaacaggatatactaggcccctgcttggatagccaattcctgcttgtctgcctccccctcccccacttctccacccctttattgccctcacccaaaccaaagaagtgtagtctaagatgaaagtttactagcctgcaaaatagctcgttttgtctgttcttatcagcctgcccagtttttatttaggtcataaatcaaatacttgaagagccccagagctgactaggattgcaatgcattgtgggctgcaacaaaatgcagcaagacaaccctaaaaaagaaaaacacctaaagtccctacttaacaatcaataggcaacgtctgggaagattgtgaccccatgcctatgtgttcccaggctatgaggctggagtcttttggacgtaagtcagctgggcttgagtgcacttggtaaagattctcctgtttcaacccgaggtctctctcgtcctcctgaatcccacaacaagccgattcaaggcactttgtcttggaaatggatcactgtgtacattatttccttcagtgctacatgttggcatacttccagggtcttgcatcccttcccctgtgattcttcccttggtatgagttgtccacatatgcagtggcctgtcagcactatgtgttcccagactatgaggaacgaggggagggacctgcgcactgggagataaattgcttgttgaaactgcactgggtgtgcctgcccatcagactcccaatcttgcaagaccatcattaaaagtctcactctcgctgttctgtgggtctttgagaccattctttgggtttggacaggtgagtttgtttctcataacaccctaaatcagaagtcaaactgcacacttgatctctcaagtcacccacttggccctcttccaagtgtattttacttcctttcattcctgctctaaagcttttaataaactttctctcctgctctaaaacttgcctcagtctctccttctgcctcatgcccctcagtcgaattctttcttctgaggaggcaagaactgaggttgctgcagacccatgtggatttgccaccagcaacaaattgatttcactttctatttttttgagatggagtctcactttgtcacctgggctggagtgcagcagtgggatctcagctcactgcaatctctgcctcccaggttcaagcaagtcacgcctcagcctcctgagtagatgggattacaggcgcgtgccaccatgcccagctaatttttgtatttttagtagagacgaggtattgccatgttggccaggctggtctcgaactcctgacctcaagtgatctccccgcctcagcctcccaaagttctgggattacaggtgtgagccactgctcccgacctgacttcactttctttccacataagcaaaattccatataaatcagcaacactgtttttacccattgacaaggttgtgtccagttcatcgatcattcctcaggttacacgcacgtgacctacctaagtttataacacaatgcttaaaaacagatttcaatgggggcaatttcttattaaggcattttgataatcagttgatttcaattctaaaactaaattaaatttgtttttctcttagtggaaggaggcagcaagatatatagaaaaggcctttaactccagaatccaatgatggtttcagtgctcaaattaataatgcaacttttctaagccttgggttttttaaatcaaaaggtagagataatcataccaatgtcatagaattgttgtaaggtttaaataacgatcttaaatcatgagtaaacaccactcttcccatgcatgcaactgaatgccaatatcgccctagacatttggtcgtctagctaggatcctcccttccctggcttcatgttagaatcacctgggagtatttaacgaatacagtttccaagctctacccccagaaattctggtgtaattgatctgtggtggggcccaggcgtcattatttttttaaggttcccaggcgaagtgaggagcccctctgcccggccagccgctccccgtccgggagggaggtgggggggtcagccccccgcccggccagccgccccgtccgggatgtgaggggcgcctctgcccggccgcccctactgggaagtgaggagcccctctgcccggccagccgccccgtccgggagggaggtggtgggggtcagccccgagcccggccagccgccccgtccgggaggtgaggggcgcctctgcccggccgcccctactgggaagtgaggagcccctctgcctggccaccaccccgtttgggaggtgtacccaatagctcattgagaacgggccatgatgacaatggcggttttgtggaatagaaaggggggaaaggtggggaaaagattgagaaatcggatggttgccgtgtctgtgtagaaagaggtagacatgggagacttttcattttgttctgtactaagaaaaattcttctgccttgggatcctgttgatctgtgaccttacccccaaccctgtgctctctgaaacatgtgctgtgtccactcggggttaaatggagtaagggcagtgcaagatgtgctttgttaaacagatgcttgaaggcagcatgctgcttaagagtcatcaccactccctaatctcaagtacccagggacacaaacactgcagaaggccgcagggtcctctgcctaggaaaaccagagacctttgttcacttgtttatctgctgaccttccctccattattgtcctgtgaccctgccaaatccccctctgcgagaaacacccaagaatgctcaataaaaaaaaaaaaattttaaataaaataaaataaagttcccaggcaattataaatcacaaccaggtttcagaatcaatggacagaagaattctcaaattgaaatctagaaatcaatttcaacagaatcaccagggttgattacagaatgaggattccagggcagagcctcaccctatgctgactgagtcagaatttctggaaggagccttaaaatcttttttttcttttttccttgggtgtttttgagatggggtcctgctctgtggccaggctggagggcagtggcacaatctcggctcactgcagcctctgcctcctttgttaaagcgattctcgtgcctcagcctccctagtagctgggattacagccacacgccaccacacccagctaatttttgtatttttagtagagacggggtttcaccatgttggccaggatggtctcaatctcctgacctcatgatcttctcacctcggcctcccaaagtgctgaaattaaaggcatgagccactgtgcccagccaaaatcttcatttttgacaacttccccaggcaattagaatgtatactaattgcctaatttatttatttattcatttatttatttatttgagacagggtcctgctctgtctcccaggctggagtgtggtgctgctatcttggctcactgcagccttgatctccccagactcaggtgatcctctcacctcagcctcccgagtagctgggaccacaggtgcacaccactatgcccgcctaatgtttgtatttttttgtagaagtgaggttttgccatgttgctcaggctggtctcgaactcctgggctcaagcacttcgtccacctcagcctcccaaagtgctgggattacaggtgtaagccacttcacccagccactacttttatttttctttaatatatggaagtacggatttataacactgtgaagctagacattgttatgatatttttacagatgagaaaactgaaattcagaggagtccagtaaccttctccaggttaggtggtccccatcactaagaagtggtcctctttaactcgtttgttccatggctgctctctcaagtgattccttactgagtcatgaaaaccatttcccactcccctcttctctcccactacctcattaaaggaattgtttctggccaggcgcagtggctcacacccgtaatcccagcactttgggaagccaaggtgggtggatcacctgaggtcaggagttcaagaccagcctagcaaaccccatctcaactaaaaatacaaaaattagccgggtgtggtggcggacacctataatcccagctactcgggaggctgaggcaggggaatcatttgaacccaggaggcagagtttgcagtgagctgatattgtgccactgtactccagtctgggctacagagtaagactccatctccaataaataaataaacaagatgtaaccattgggggaaactgagtgaatggaggccctccgtactatctttgcaatttcctgtgaacctttaattatctcaaaatttagaagttaagaagaaatacagtgaagcaactccaataagcggcatatctagcttgtttagagcaggcccaggatgtgtaagaggtgcacattctagaatatatttgaacgtaaaggtaaaggagatgcccctggtccccacatcatgatgctaaaagtgcattatctttttttttttttttttttttttttggagacagagtctcgctctgtcacccaggctggagtgcagtggcgcgatctcagctcactgcaagctccgcctcccgggttcacgccattctcctgcctcagcctcccaagtagctgggactacaggcgcccgccaccacgcccggctaattttttgtattttagtagagacggtgtttcaccgagttagccaggatggtctccatctcctgacctcacgatccccccgcctcggcctcccaaagtgctggtattacaggcgtgagccactgcgcccagtcaaaatgtacataatcttaacacctgttctgcagtgagaagctctatgaagccccaaagaccaaggaagctgagaggccacagaaagaggctgataaatccagtttctcagaaagaaacatgtcataggggcttaggaacagaagccatgttccatgcagccctgagatggtggatcccaccctgataccttccagacccagggcttatataccatagggcatttgcctaagggaaggatttatggtaagtatgtgtttatgataacataaaggttgttttgacctaagggccggatttacagtaactatgagagattagaaatcttagaggtattcccagaacttgggttaatcagaagtcatcttgggagattagtatccaagatacagttgctgtagcctccattaccctggctcccaaatacaagtttctgggagcagatcgatatacgtattgagcacctgccattgggccatgcactgtgctaggtgcaaagatcattgaacgtggactctacagcaaaagctaatgcgacattcagagaactgaggcctgtgccaagtatctccagcagaaagcaaaatgggagaagtgccaggagtgtgagaaaggaacattcaacctttactaggtgcctgttacaggacagaactctgctgggtcctcgggatatgaatatgacaagtagcacatccctgatgttagggagctcacaatctaatccaggaactgggcacacacacaaacaacgggatatactttccagctatgtaaagcaagccttcaattgtgcaactttgtttaacaatatatcaaacagtatataccattcccatcagcagtgccttaatcataagtaaacacatagaaacacctaaaggagtacccatgaagctacagatgcgacgtacaacatgacaacaaacttcacaccagtgccttagtgttcagtttccttgcaaattcaaggaaataatactaatgagtaatggatcaggtagatccttttgcttgcaagtaacagaaacataagcttgcccacagtgaaaggagacagtatatgtccatttaaacaagtagggtaggcaaagaccagggatttagcccaggcaggacattatctcacttcctttcatctctgcttctctctgcatgttggcctcagtctaccgctgcaggtggactttccccaggcaacaggagacctacagcttcatcaacacctaccccatggccagagagcacaaagctctatccggccagctccaggcaggcagacctcaaggcagcatgctgattggccaaactctggtcacatgtccatctccagaccaattagtattgtccaagtctgttaccaatgaagtaagtcccacgggtcactgaattcaaattgttccattgcaaagagtgtcacctctcagatgccctttcagaaaccttagagcagttattattgcaatgattaagcaacaattaataataacaagccaaagatcttccttgattttaacttcacgaatttaaaatttattcttatgtatacatagcactgaattgtatttgtttaaaagctcaaaatcactttttaatgtttatgatatattaatatacaatgtaggactaagaaaaattatacttttgtaggccaggtgcagtggctcatgcctgtaatcctagcactttgggaggcccaggtgggcggatcactggagcctcaaatgctggaggaggcccagggagacagcacgtctctatcaaaaagtcccccctggggttacaggtcatgacaaccctggaggggtaatggcagtacaagagtgtgtctaggccgggcaccatggctcacgtctgtaatcccaggactttgggaggccaaggcgggtggatcacctgaggtcaggagttcaagaccagcctggccaacatggcaaaaccctgtctctactaaagatataaaaattagctgggtgtagtgatgcacacttttaatcccagctactcaggagactgaggcaagagaatcacttgaacccgggaggcaaagattgcagtgagccgagatcatgccactgcactccagcctgggccacagagggagattctgtctcaaaaaaaagaaagaaagaaaaaagaaaaaaaaaaaaaagaaagaaaaaagaaaaattataccttttcatttagttgactaataaccataggtatttgtgtttattacatactttcaaatattaaattatatttcttttgagatactccataatttagaattttcctttatgtaaactcacgtttttcccaataactctaagccaatgaggcttggctcctctctctgggcctttctttctctctctcctcagtcaaacccaccctctctgctgctcccataaaacgtctaggagaactggttaatttcctcataagacaagatatttggctttaggatacaaatgtgactgggcaggctctctgcccagggactgggcccagctccgagtggggtttgttccaacagagaatcaccctaacaggccccaacaagaggatcatgggttccagcttctaggaatgagggcttttctgctacatgatgcccagcaccttgtcttctgtgaatcttggctcaagagaatgaattcacactttgaggaagaatggggaagaatttttgggtgtggtttttggttgttctgtggggggttttggccattaaagaaaatagctcccatttcaggcgcatattcaccccaggaatggggttgctgaactgtgcctttgaagaatgaatgctagtactcaaatccatcatcacgatgggcaccctaccttagggatgaagttttatgtggtaataagtaataaaatatatatgtacgcatttcgagagacatagttacatctcatggaatcagaagcagaacaagctgtttccccagagactctttttttaacttcctgtcagcctcagtgatggctccacaagtgtttattgccaatgagtgacataatcgctgtctcattcagacagcacattttgcaaagacactccgtttgactcactcagacatactgggtgtgtgtgtgtgttgtaatatttctataagctaccacgtgcttttaatttattgagttttcaaatgtctaggcattcactcaggtttaaaagtaagtactcaagaaataagcaatctatatttccaaccacaacacttgttaaattgaataaacaggaaaaaaaaggaatgaaaaataagctttttagaactatgtttcaggctgaatgaggtggctcacacctataatctcagccgaggcaggtggataacttgaggtcaggagttcgagatcagcctagccaacatggtgaaaccccatctctactaaaaatacaaaaatcagttgggcatggtggcaggcgcctgtaatcccagctactcgggaggctgaggcaggagaatttcttgaacccaggaggcagagtttgcagtgagctgagatcgcaccactgcactccagcctgggcgacagagcaagactccatctcaaagggacaaaaagaaaaaaaaaaagaactatgcttcaaatggctcatagaacataaggtaaagttctgcacactcaggattcccccgcctgtaccatgacacgcccttgactcattgctcattttaggtaactaccatcgctgccctccaggtgcaaacctctcaccctgactttactatttctttcccgcttgcttctctgccctgattagttctccctgaggcacacatcacctctgttcaccaccctaccactatgggccgttttagaagccctgttctcctgtgaacagagaggggtgtctgtgttttggagtatgcgttattgggtgtggcagccacctccaggcaggtacacccaataacccaataatgcctctttcccttacactctcaggctctcccacgagcccaggcatggccacgattagcaagcaaaggtgttgaaaggagtaaagcagaaagtattttaaagaaggcataacagagaagacccagttctcctaggccccactcccactccaataaaacaaaagaccctctgatttggatgacagaggaagaagccttggaaagaaagtaagagggtaagagtcagtgtaggggccacaaaatttgcccttcatttggtaagtcgagttgggggtggaaggagaagtagcaacacacaataaagctcccttttcactttcaaaatccaagaacaagaagggcctgagcctcaaatgctggaggaggcccagggagacagcaagtctctaccaaaaagtcccccctggggttacaggtcatgacaaccctggaggggtaatggcagtacaagagtgtgtctaggccgagcaccgtggctcatgtttgtaatcccagcactttgggaggccaaggcaggtggatcacctgaggtcaggagttcaagaccagcctggccaacatggtgaaaccccgtctctactaaaaatacaaaaattagccaggcatggtagcacgtgcctgtaattccagctactcaggaggctgaggcaggagaatcacttgaatccaggaggtggaggttgcagtcaggcgagatcacaccattatacccagcctgggtaacagtgagactctgtctcaaaaaaaaaagaaagaaagaaaaagaaaagaaaagaaaaaagagtgtgtctaggcttgggagggcatctggacatacccatggccaccccctgccaggggtctattgtgcctcagatgcaaagctcacatcctaatatctatcccagggagaggaatagtgcctgaagtgatcatcctgaatatggttgagcttgttccaattgtgacaaagctttaaatcagtaatgcccccaaattactgaatgtagctggatatacttaaaagtagccagactatttttccctttatgagaactaaattcagttatcaaaaaagttacatttttgtatatctgatttttgaaaatgtataacattacatgcatgatttaacctgtattttcagacatttctttgtatacctgtcccatctccatacactttaatacttggaatttgactttggcccactggcaccacatccccttacaatcttctctaatgaaaggtgagttttggccagtcctccctcaagggaagcgttccctaaccacccctcctcctccttcttcctttaaacactctcacagaagcttctcatcatagcatttattgtacatgattacctatttcattatctgtgattatctcacctactgaactgtaagatccatgtctttttttattgcttctatctccaggatcaataatggtgcctgtcctaaaattggtatgcagtagaatctagcagattctctatttacgaacattcaactcacaaacttcacagatatatacaagctcctctggaagaccagagtgcatcaaatctaaacagcaacaatattatggcctaatctctattacaaatacagttaacttataactaacataaacaggtggctttccttggaacacaccccactccgctgcctcaaaggattactactgggaccaccctttggcaaaataagccctatcttcttctgttgatgtctttcctgatcttcaaggcccaatctaaaagcttcaccattctatatcttatttcaggagaaaattcagctccacttgggatagttcaatgagactattcattttaaacgttcttgattttgatttactttttgctttcccaattataggcagacttggggagaaagttgaccaatataaagacagggagaaaagagaagcctcaacataaaagtgaagtcttgggagggtgaggaatgctggttaagctataacatgtttggagagatggtggagaccagcagggtagtcccttgccttgtaagttcctggtggggtggctttacttgctgctagcattccatgcccttcttaaagcagcagcctaggggcttccacatgccttgtttggttttcctcaaacactgagtgtctggaatacatcagacacccaagacagagtggaaaggcatagactgtcctcaaagaagatgaacaacgaaatggatgaccgcaatctgatgtgagacaaatgtcagggcaaagcgtgggtagaaagagagcagcacacttgtaatcccagcagtttgggaggccaaggcaggtggatcaaaaggtcaggagatcaagatcatcctggccaacatggtaaaaccccgtctctactaaaaatacaaaaattagctgggcgtggtggtgcatgcctgtaatcccagctacttgggaggctgaggcaggagaatcacttgaacctgggagatggaggttgcagtgagccgagatcatgccactgcactccaacctgggtgacagaacaagactccgtctcaaaaaaaaaaaaaaaaaaaagcaaaagcagcacccagcctgaggaggctgaagccgtaggagagagaagggcaaggaaacgggagaggtgagcattcacggtggggatgggaagggaagaagctcagtgcctcctccagaactaagagccaatacataatgactaaagccgaaaatctacaaacagaaatacatgtggctaatttggagaactggaagtaaatttcaaaatgaccagttcagaggtagtgagacatctggggaggggagaagtgaaagggaaaggggctgatgcttttcataataaaccctacaaaactcgggtgtcatggagtcatggataaaacaaaacaaaacaaaagagggaaaacattaattgaaaccttatttgaaagctacataatttccatcatatggaaatgtcatatttttaagcaatttcctactgttgaatatttgtttctatttgttcctaatataaaaaaggctggttgaatagatttatccatggatcttgctctgcatctctgtctatctcctctgggtagataccccttccagggcagaaggtccagaaaagccatgccctttcaccataacccacggctccctctcattagaaccaacgaaacagcctggaggacaaagaccttcatgaacaataatacatttaattagtttcattatacacttattagtaaaattatacatgttgattactagtttaattttatggatgcatctaatttttaactagcccatcccacccaacctcagaccccaagggaaagggaaagaaaagcaagccaaaagtgtgaccagcagtccgaaggagtgtcagtgttcctgggcccaggccaaagcaggcctgtcagggatgactggacatgtgctgctgagggttacagccatcctgagagcccagtcttgccagagttgggagcagaaatgcagtccagcccagcaaagagacacagcccaacccagcaaacaggaacttggcccccaaagccagagctgtgctcatatttcactgccacaatctccatcaatataactgctgatctggaagctgtgaatgtttgtaagctctggatacataatgtcaatccaccttccagagttctggtgctgctactttgtataattgttgttgcgccaaaaatgatacaaacacaatattgacctctagattcttgcaagcgaatgtatgaatgtataatggtcttcttctagacggatttcaggaaaatggtaaggtattgccctgagctatgaattataaattgtgaagcaggtaaagtcatatccctcacgtcttgtctttgtttctggagtcggtcctgtactgtccagcacaacaaccaccagccccatggggctactaaacacttgacatgtgtctagtccacatggagatgcgctgcaagtggaaagtacacaccggatttcaaagatcagtgcaacaaaaacactgaaaatgtctcattaattttttatattgattacatgttgaaattacaatattttgaatatgttaggttaataaaaatacatttgtaaaattattttcacttgtttctttacacttgtcttaatgtgaccactagaaaatttgaaatcatatatgtggctcacacttgtagcttgcattatttttctattgaacagcattgctctgtagagaagtaagcgtttttcaattcaacccagagggctgtgggccaaggcttacttcacagtgggtttcctaatctgtgcctttcggtgttgctagccctgagcctactacctctggcaattttcaaggaaggctacaaggaaaggcaagctgcttaccgttgaatccccctgttccagctgcacggatagagaactgtattttcggggcattgccagtagagggcattcttaccacacttaagaccaaaaaactggaaaactaacgaatacagattgtctttaatacattctggattgttagttaattaagagatagattgactgaactaagaaaataaaattaattcaagagtgggagaatttctttaaaatttgcagatgaaactggtatttggggattgatccaatgaccaaaaaaaaaaaaaaaccattaaaaggagcaacagtatttgaactgcttttatttttttctaaaaccctttgaatcacaatttttaaaataattttaattcctttgtcagaccactagacacagaagagtgaaattcttaaattttctgaggtaattactttatttataaaggagctttatcctgtcatttgtacagaatatttataacaaaaggttgacctggaagtcaatatttcacgttgtgtcagaatgctcttcatggcagttactcatctgaagctaactgtctctagatactgcttctccttggaaccatttagtaatatttggatcatgaattagcttcagttcatgttgccattgctcagggttcttgattgctgactggtatccttgtcagaagagggaaattttggctggcgctggtggctcatgcctgtaatcccagcactttgggaggctgaggcgggtggatcacctgatgtcaggagttcaagaccagcctggccaacttgggaaaaccccgtctctactaaaaatacaaaaattagctggtcatggtggtgcatgcctgtagtcccagccactcaggaggctgaggcaggagaatcaattaaaccagggaggtgaaggttgcagtgagccaagatcgcacctctgcactccagcctgggtgacagagtaagattctgtctcaaaaaaaaaaaaaaaaaaaaaaaaaaagagggaaatttgggcacagagactcagacacagagggagaacatgatgtgatgacgatggaggcagagatggagtgatttgtctgtaagccaaggagaaccaagggttgccagccaccaccggaaactagaattaggccaggcaggatccttcactagagccttcagagggagcattgccctgattttcagacttccagattccaggacagtgacaggatatatttctgttggtttttgtttggttggttttatttttaagacagggtcttgctctgtcacccagactggagtgcagtgatgcaatcatggctcactgcagcctcaaacccctaggctcaagctatccccccttctcagccttccaagtagctaggactacaggcatataccatgccagacaagtttattttctttttttaaaatctactttttgtagagacagagtttcaccatgctgtggaggctgggggtctcaaactcccaggctcaagcaatcctcctgccttcacctcccaaagtgctggaattgcaggcatgaaccaccatgccccaggctccatttctgttgtttgaagccattctgttggtgttacattgttacagcagcaatccagacacaattttctgttttcagagctaaaacatttgataagatttctttaaaattattttttaaatttctttcaatccatcacagaaatatttcagaaaaaaaagagctaggaaacctatttgtttagatttattcacataagtatgcgcattaatttgaaaataaatgcttatataaaattatataagattggtcaggggctgtggctcaggcatataatcctagcaccttaggaggccaaggtggaaggattgctggaggccaggagtccaagaccagcttgggcaacatggtgagactctcatcgctacaaaaaaataaataattagccaggcatcatggcacatgcctgtggtcccagctacctgaaaggctgaggtgagattgctggagcccaggaatttgaggctgcagtgagctatgatggcagtgctgcactccagcgtgggttactgagcgagatcctgtctctttaaaaaaaaaaattacataagattaataaattacagagataggccaggcgcagtggctcacgcctgtaatcccaacactttgggaggccgaggcgggcagattgcctgagctcaggagttcgagaccagcttgggcaacacagtgaaaccctgtctctactaaaatacaaaaaattagccaggcatggcagcgtgcacctgtagtcccagctacttgggaggctgaggcacaagaatcgcttgaacctgggaggcagaggttgcaggagacaagatcgcaccactgcactccagcctgggagacagagcgagactccattgcaaaaaataaataaataaatgaataaaataaataaaaataaattacagagataaatatatcccaatcccaacttgtcatatacatatttcttcatcaagaacctgcggcctctcagtatcgtcacatgctgcatcttagctgtcacactaaccgtatgatattgacattaactggtgatgaaacgggacttaatgtcgctatgtggtctagccaggctcaggcatccagtacctgatacctgcttttcttctctgggttagagtaaaaagaatgtccacagcagagatgagcttatgaattgattggaaaataattttctttaaaacttctctagggaagaatctccacagaccacattcttggcaccatcctgccacccaccttggccccatcctgccacccaccttggcccctgcctttctgctcttgaaaagcccagcttctcctctcccactaccgagaggcagctcagtaatgaattcctcttagtagccagcccagcccagcccaaaacagtctcttctccttcctgaagttcctgcttgtaacactactcgccgttattacacaggattgtgtattgcttatttctccatatgtgaatagattgtaagctctttgaaaatagggatcatgccctacacagggagttccctgtgaaactgtgaaagctggaaacaccacgaatgaatgctcatttctgagtgccaacaagaagtcccaggtccgagaatagcaaatgacaggtgctccaaatgggataaatgaactaatctaaagttgattccaaaagcaagcactgcatgacatggaaagggtttataactttgcacgttataagggtcactggtggtgcacaggagatgaagggcagtggccactgttggcagaaacccgcatgctgttctgttttcctaaaataaaaaggaagcattggccaggcgcagtggctcacacctttaatcccagcactttgggagaccaaggtgggcagatcacctgaggtcaggagttcaagaccagcctggctaacatggtgaaacgccatctctactaaaaatgcaaaaattagccaggtgtgatggcgggcacctgtagtcccagctactccggaggctgaggcaggagaatggcatgaacctgggaggcggagcttgcagtgaactgagatagcaccaatgaactccagcctgggtgacagagcaagactctgtctcaaaataaaataaaataaaataaaataaaataaaataaaataagaaaaaggaagcatccaacagtatccacgatgtggtaaaaatgcagaaacacagagcagtgggggcgtgatgtgctggggatgctggtgaaaaagaggagcccgaaaagaaggatggagaaaaacaccaagcagaggagcagctttactcaatcggtagaatatccctaacttggagcctatcagagctgacccgactacatggagaagccttgggcattaagtgtcagaattcactgcaagatctgagtgagagaccttacaaaggtaacattcaatacctttgtaaagtactgggctccattaataagtttccctacaatttcatacctgacagtctacattacataagatagcattatgctgtgtctgccgcagtgatgccctagaaacaggagactgttatacggtctactttattttcccataggaataatgctacaccttggcatcaagtagttcatagaggtaaaaataaaaagcaccaccagttactgagtgtctgctatgagccaggtaattgcctgttcttgagtctcacttcaaaatctctaatactttctgttataccatggagtctcaagaggcaggcataaaagcataggtgcaactttaagcatccacagtaatttcaagtgatataattattttctgcttcaagggactgatttaaagcagcaagataacttagaggtgatgtagctttttctcttcactgacaagcaaactaaagacaaaagagagaagctaagtgaccttcccaaagtcaaaaggtaaggcagtgggatagctgagtatagaactgaagtcttctgattccatcagactcctttcatccaaaccccttcctttactctctgagaaaggcaccaaagctgttgagtggaagaggcaggcttagaacttaggacttctggactccagagagagctctttgcacaacattacaatgtgtagacacaacaccataaaattacaatgtcactgttggtacttctaaaatatatctgtgttgttaatactcatgagttagacaatcaatgcccaatgcttcccttttagggaaatttagaaggagcttggagagttaggtacctttcacataatagtcaactcaatttagatttgttgattgacatattggccacttggatcaattacatgatactttacactctggggtctttgaagagagccaacttctaaacaagttaatgtttccatctccctccaaggtatacatttcccctgacctaaatcaaccccttaggggctcttataatatccctttcctggagtttctcacttgtccctggcacaataagactactttgcttaggggtattccttaccttgataggggtagtatattttctcttttaagagggaacctgaaccttttgctactacaaagtccctccattggaaaaaatgagccctaaaacacaaggagtgaaagcaaaacatttctgtcttttcatgtctttattggtaatgttcccaagcataacatctcttactacagcattttaataacctgtgaatgcctaatcataagactatatgagaggctgggtgtggtggctcacacttgtaatcccaccactttgggaggctgaggtgggcggatcatgaggtcagcagttcgagaccagcctgaccaacatggtgaaaccctgtctctaccaaaaatacaaaaattagccgggcatgatggtgcgcacctgtaatcccagttctcaggaggctggggcaggagaattgcttgaacctgggagtcggaggttgcagtgagccaagactgtgccactgcactcccgcctgagcaagagagcgagactccatctcaaaaaaacaaaaacaaaaaaaaccagactatatgacaggcacttgtgattaatactggaatccactgtttctcatatgatttttgcagacccaatttgcatctttacaaaatctatgacaaatttgtttttcagactgcaactagtggtcattcacatgttactgagtgtgttttgcatgatactctttggcccaatgctttgttgtgctaggttaggtaagctacagaattctccaagaggaccaggggcggaggatggaattttccaatgaaaaacacagccattttgcaacttcgaaaatatcactggccaagaattgcccttgggaatagtttgtctggcatagaagagcttattttcccaggacaaccttaggatataatttggtaatgagatcatttggcaaccttgaggtttaatacagtgaaattaaataattgaattggctgtggtttttaacttactcctccaaggtggaatttggccaagattatgagtaaacatttgggcttccaagacttccattttggaattacgatttgaataatatgaaaagacaactctctttggtagcaccgagtgcctttacatgaataagtaaattctttcattgtatccagtttcttctctaggcataattcaggcccagccctttccatgatcactgaaaccaacatctctcactgcttgtttataacttataagccgtaaaatgtatttatcattcgttttgacccataaagactgccttcggtatatatctgctttattttttcagtcgttttagaagttttcaagaaggggccatgtttgacttctgtctgggactcatttctcttaaacatcaaatttaagtgctgcatacctgacagagtctcaactaacactatctgaccaagtgattgaaaaccattattggttctaacacagctgtgccatgaattctatcgtctcttctttgagtcccagggttcacatctatttacacatataaataagaattctatcccatgttttgatttcaaagcccaacattattacagctaaagcataaataggagtattgaatgtcttatgtacttaaaatattgaccttcaagtgccctgaaacagcaacttctaataaaacattgttgaagtttggcaatttttggtttttcatagggaaactgataaattacaaagaaggtaaccagctgattttcaatcttaaggttccaattggggtgacctttttcagcggcccccagtcctgtttccttacttcctactacccagagtattaccctaatctgttactcaaaaatttacctaagggccgtttactaaaagtttagctagtaattaaatcataaggcttctctgtgtgttccacacaaaaccacaaccacagcttatttttttcctgacagttatattctttttgtttttatagccaattttttttagatgttttttattttcttttttctttttttttccagacagggtctcactctgttgcccaggctgtagtgcagtgccatgatcttggctcactgcaacctccacctcccaggctcaagcgattcttcagcctcagcctcctgaataactgggatcacaggtatgcaccaccacgcctggctaatttttgtattttttgcagaggtggggtttcaccatgttgcccaaactggtctcaaactcctgagctcaaagcaatccgcaccccactcggcctccgaaagtgctgggattataggcatgagccactgcacccagccatgacagttatattctttttaaaaatggctgcagtatcaagaaatgatataaagttatgcactttgaaaaggaagaaaagagagatggaagcaaagcttaaggtctcaggaaagatttgcgtgaagttgatacaaatgagcttgtaaaaagtgaaggacctgagcatggtgctgcacacctctcatccctcctacttgggaggctgaggcaggaggatggcttgagcacaggagttccaggctacagtgagatatgatctatgttcgtaccactgcactctagcctggtgacagagtaagagagcattatacaattttcaggaaaaaaaattactaaacaaacattataggcatcatatttgagccctctctgatacataattcctactcttatgatgtcttcacttatttctgcttaatcttgttgacttgatttagcaatcaaatcggacaatgaacaactaatgtagactataattcctgggaaaatatgcagttagacaatgatatgcaaaattcctttgctcatgtagccaatcattagcctgatgatggcattgttgctatttaggagattgtaccatttggtgctggggggactcctgaaattgaacctaaattctcctgaaactagtccatgagaaataaagaggtggatttttggaataaaaatgattccactccaatactctcaccctagatctgcgtgttgatttagtgacagcaatcttggcactccaaattttgccaatccaaaagacaactggaatgagttactctggagaagaggcactcagtggacaataagagcttgtagatccagatgaattttgctgctggaatatgtattggtcagcatatttccaagatatggaaaactaattcctcttttctaaaccaaatgcttcccctccatacaatgtcccaaggcagtgctttacctttctttataagcatctgcctttggtcactcctcttttttattatctattgttgatatctaaataaatgcaacagttgtcttagtcttataaaatgtaaattacatattcacatctatatagcaccaacaaaaattttatagttgcttgtgagcatagcatttagaatatgaaatcttacacatttctcttatgttaagagcagaatattaatttttcctatctcctttatagagatgtgttctgaaatattactgtagcagatacaccccagtaagtcatacctctgtgtaatttccttctccttgagtgcaggcagaacccgtgacttgcttcaaaccaatagaatatggcaaaggtgaaaggattttgtagatgtaattaaggcacctaagtagttgattttgaattcatcaaaaggatgattatcctcagtgagtcctacctagtcaggtgagccctttaaagagggtatgagctttccctaaagtaagagacttgaagcagcagaaactctgcgtgtgtgtgcatgtgtgtgcgtgtgtgtgtgtgtgtgtgtgtgtgtgtgtgtggctttcaagaagcaggttatcagctgtcatgaattctacagctccagggaaatgaattctgacaacaatcataggcagttggaagcatatccatccctagttgagcctactgatgaaaatgcatcccagcctacaccttgatctcagccttgtgagaccttgagcacacaacatagctaagctgggcctggcttctcgatccacagaaactgtgagacaataaaagtatgtcgttttaagccactgagtttgtgctaatttgttatgcagtaatagaaaactaatataatcatatttcatgtgttaaatgattcttcataagacactagaaggattttctttaaactttgggagaatataaggatgtctattcttgacacttttaactttgtatgggaaagaggcaaaggtatcattgtttgcagaagttttcatcatttgcctagaaaccctcagagaacaggtagatgatctattagaaacaaagtgtctgccaaaatcaacctgcatatattcatggtctcctgtatataaaccataatctgctagaaaatatgggaagaaaatatattacttgtgatagcaacaatagcacagtgaaattcctagagataaatccaaatcaaatgttcagaaaccatgtgaagaaaaatataaaacactgctaagaagcatacaagaaaccgggtgccatgactcatgcctataatcccagcactttgggaggctgaggtgggcagatcaggaggtcaggagttcaagaccagcctcaccaacatggtgaaaccccgtctctattaaaaatacaaaaattagccaggaatggtggtgcatgcctgtagtcccagctattcaggaggctgaggtaggagaatagcttgaaccagggaggtggaggttgcagtgagccaagatcaccccactgcactccagcctgggtgacagagcgagacctgtcaaaaaaaaaagcatacaagaagacttgaagaaagacgtatcatgatttttaaacctgagggaaactcatttctataacgatgtgtccatctactctgaattaatatatcaattcaattacaaaataaataaatgttttaggtggaatttgacaaataatactaaaattcatgtggaaaagtaatgtaagaaaaatctgaactattctgaaaatttttgatagcaaacatttaatgagtgttaactatgttttgagcccaattctgtgatgttctaatctcatttaattctcatgtagccccagtagacagagagtaataccacccccattttacagatgcagaaacagcagtttagagagattgagtaattgcctactatgtgctagagtcaagattctgaaggtggcgtggtggctcatgcctgtaatcccagtactctgggaggctgaagcagacagatcacctgaggtcaggatttcgagaacagcctggtcaacatggtgaagccccgtctctactaaaaatacaatatattagctgggcgtggtggcgggcacctgtagtctcagctacttgggaggctgaggcaggagaatcgcttgaacccaggaggcagaggttgcagtgagctgagatcgcatcattacactccagcctgggcaacaagagcaaaactccatctcaaaaaataaaaaataaaaattgaagcaagcattctgatatcagaaactgagcccttaactagtgttgcattctgcttagaagaaattgggcagtctcacaagatactgaaatgtattataaagccattgtaataagttttgttggagtaagaataggtggttaaaaggaatagttaaaacatcatcaagaattcagacaaatccttgtgagaaaatggtacacaataagggctgccctttcaaatgagtgaagaaaagatgaatgttaactaaataatattggaacaattggctactcatttggaataaataaaacaccaaaataaattccagacaagtcaaagatttagatgcaatagtgaaaccctgaacacactggaagaagataaaggtatgatgttgttgttttaaataatctactagtgggtaagctctttctcaacacagcaaaaaagaaaaagaataataaattttcatgccaaaaaagtaatgacccaaatactaacaggtaaaatatgtgcaacacatacaacagaagaataccttgttttatatgcttttataaagcatataaatccataaatccacatccacagactcaaccaactgcaggtgaaaatatgagtaaaaagaaggccaggcacgatggctcatgcctgtaatcccagcactctgggaagctgaggcgggctgatcacaaggtcaggagttcgagaccagcctggccaatatggtgaaaccccgtctctactaaaaaatacaaaaattagctgggtgtggtggtttgcacctgtagtcccagctactcgggagtctgaggcaggagaatcgcttgaacccgggaagcagaggttgcagtgagccaagatctcgccactgcactgcagcctgagcgacagagcaagactctgtctcaaaaaataaaaaataaaataaaataaaataaaaacaagatgggccaggcacagtggctcacgcctgtaatccccagcactttgggaggccgaggtgggcggatcacctgaggtaagaagttcgagaccagcctggccaatatggtgaaaccccatctctactaaaaacacaaaattaccagggtgcagctaaaaaaacttctttcttctgtttttttattctagcctgcaaacttcttgagggcagacccgtcgtcttttcttctgtgctaatgccttatgtcatgttcacccttatatgactagcaatgaggaattgctgcttcatccccacgccctccatcacatggctgaatgaatgacattgatgggttgattcccacacctccttatcagtccacaagctggctgtggcttcatatgaataaaatgaatagcaataagtgagaaagggctgggccttcaaggtagctgagcacattcagaaaggaatgtaacctgatgggctcaaccagcttcctgcctgacaactgcctgagtcactttcatgggactcatatgtttcgggtcagggaggaagctgaaaactcaacaagtagagacttgacttctgggtgcacatgaggggacgaccttaatattaatattatgcatgtcctttaacatggtctgagtgaaatgaattcagtcctgggtggtctgcatgtgagatcctatcgaaggctgaatacacaaacaccacctgccaccccactgaccttcctagtttctgaagtccttgatcacagcagggaaactccattttgttcaacaaaccttagctatttaagaacacaccctctttgtacttgtaggtggtaaggcagggggagtaggttgtaaatggaataaaatgaagtcttagcccttggggattttatcatcgagaaaagtagaacactgtgctagtaagatcaacaatttttgagcatctgctctgcaccaggcactgtgttaggcacttggcatgtgtgatttaagggcaattcaaggtccaaagtgtgatgagagctcagagagatttcagaagtttcctgaagaagtgacattggaactgacacttgaggaatagtatgattttaacaggttgaattggtgaaagcaatggaaggagccaggatttttttttttttctcgagatggagttctcctcttgttgcccaggctggagttcaatggcatgatctcaggtcattgcaacctccccctcccttgttcaagccattctcctgcctcagcctcccgaatagctgggattaccggcccccgccaccatgcccggctaatttttgtatttttagtagagacagggtttcaccatgttggccagactggtctcaaactcctgacctcaggcgatccacccaccttgggctcccaaagtgccgagattacaggtgtgagccacaccaggccagaagcaagaatctattcttcaaagcccaagaggcaaggaacgggggctgcactgcaggaactgggaatatcccttttggctctgcatcccttgttttctaaaatgaaacacttgcaggaacctcccatttgatcttactgcctcctctctctttctggtgtatcctaaaaggactgtcagatccaccttcatgaaaccaacatctgaccaaatcacaactctaccaagaaggaagacaggaagacagaaaagcaggaggtagtgacagaatgaagagggaagctttcaacattatcttacagaataatgtccaaactccttattccaagcctctaactggcagtgccagttggtgtatttttagcttcatctcctgccactccaaccccacagtgcctctgcttcctacattccagggatccctcagagcaggtactttattcttccgcgcctttatttctgcttttccttctgcctgaaatggcctgcactccgtcaaaatcagattaagattttaaacttcagtttaagtgaactttccctaagacatccctaaccactcattcaaaattaagccttctctctcctgtggtcccacaggacttcctgcctctatcctagcacttgtcaccctggagtcagaagacctgggtcaaactccagctctgccatataaaagctgaatgaattgggggggatttctactgatacctctgaggctgtttccctttttcttcttcttcttctttttttttttttttttttttttgagatggagtcttgctctgttgccaggctggagtgcagtggcacgatcttggctcactgcaacctctgcctcctgagttgaagtgattctcatgcctcagcctcccgagtagttgggattattggcatgtgccaccacacccagctagtttttgtatttttagtagagatggcatttcaccatattggccaggatggtctcaatctcctgacctcatgatctgccagtctcggccttccaaaatgctggaattacaggtgtgagccaccgcgcctggcctgtttcctcttttgtaaaaatgggatacttaagatttaccttgtcgtatacaataagataatgtatgcaaaactcttacacatgtaacatatttacattttaaatatgtaaacggttaaaagtttctactccactaaaatgtaaggtcccagggaataggaattttaaaatgaaaaattttccttttaaaataatacttacaggctgggtgtggtggttcccgcctgtaatcccagcacatcgggtggctgaggcaggcagatcacttgaggacaggagttcgagaccagcctggacaaaatggcaaaaccccatctctacaaaaacacaaaaaatttgccaagcatggtggcacacgcctgtcatcctagctactcgggaggctgaggcaggagaattgttatgggaggtggaggatgcagtgagccgagattgtgccactgctctccagcctgggtgacagagcgagactttgtctcaaaaaaaataaaaataaatacacaaataaaaattaaaaataaactcttacagaatagttgcaaaggtatacagagaattcccatatattcttcacccaatttcccctactgttaacatcttaaataaccatggtacatttatcaacaataagaaattaacattgataaaatactattagctaaactgcagactttattctcattcttacaacagtttttcaactcatggcccttttctgtttcaggatccaatccagaatcccatactgcatttagttgtcatcttcttagtctctacaatctgtgacagttcctcagtctttccttgtcttttatgatcttgacatttttgaggagcactggttattttgtagaagtagaaaaaccctccatatgaatttttctgatgttttctcatgattagattgaggttacaggtttgggaagcataccacagagctaatgtgcccttctccacatcaggggttccatcataacaacatggcttattactggtgataaaagaggggttttttgtttgtttgtttgtttttaccgattctcactctgttgcccaggctgaagtgcggtggtgtgatcttggctcactgcaatctctgcctcctgggttctagtgattctcctgcttcaccctcccaagtagctggagttacatgcaggcaccatcacgcctggctaatttttgtttgtttgttttgagacagagtttcgctctgtagcccaggctggagtgctgtggtgcgatctcagctcaccacaacctctgcctcctaggtcccggttcaagaaattctcctgcctcagcctcccgagtagctgggattacaggaacgcaccaccatgcccagctaatttttgtatttttagtagagacagggtttcaccatgttggccaggcgggtcttgaactgctgacctcaggtgatcgcccgccttggcctcccaaagtgctgggattacaggcgtgactcaccacacccggcctaatttttgtatttttagtagagatggagtttcaccatgttggccaggctggtctcgaactcctgacctcaagtgatccacccacctcggcctcccaaagtgctgggattacaggcgtgagtcaccacgcccggcccatctttgcttaaattataaactcagtttctcccacagttagttcagcctatgctcaggaatgtacaaggacagcttggaggttaaaagtaagatggagttggttaagttagatctctttcactgtctcagtcatcattttgcgaaggcaaattcacaagtgggaagaaaggacgggtagatgcagggcagagagagggctctgtgcttcgagcctggatgatacagatttggcaatactattctaaggagagaccagagaaagaagtttagggtagaaggtaattaattagagtatgttgaatttgtcttgcagaaaaaccctgtgaaggaaacctctgggaggctgttgtaaatgctgggctggggatggggtgggtctagagatccagatttgaagcaatttctagtctattgatagctgaagctcaagaagagagttagatgagcagaggtgaagagagaagaggacatcagactcttgagtaaattcagcttaagctcagggaggagtaagaaagggagacagtgaaggaagcagataaggaatattgggaagctggacaaacaagaactgggtagttgacaataccaatgaagagggaagaggagaggactttaattctttcggagatgccagatgagaaaaaattaagaaatgagtgagaaaaaaatgatggagtgattaaacatctatgttgctttcctttgagaatgttaactatgaaaagaagaaaagggtggtggtggctgcaaaccataggaaggctgagaaagggttttactttggttctgcctctaatccctgacgcattcaacctcctcaagccatttgcttgtaaacataactggcataaataatatctgatatgcccattttacaggacaagtgcttccctctcagaccacatactcgaggacagcggccgtccacgccttatttacattcatcttcccaacacaacagtcatttggaagatgccgagtggcgtgggaagaacaagcgggaacgagcgccgacccgcccgcggcctgactgctagcgcaccgctgtgcggccgcctcaccgcgcactccctcctgaattattcaccaccgagacgaggacggtgatcgcccccattccacagaggacacggagtgaaggcgcagtcacaggcccaaagcccccagtcggcgggtcttggaaatggacgactttttcactcaaaagctacgaggcaacaaagcatgtggatgaggagggaagggagccggggccaataattcatctcaaagtaaaagacgtccccgggggtggggaacaaacaaacaacaaaacccggctctgtgcttccgcgcttgcgctctcctaggtctgccaggctgccgcccgcgcctaggccagagtctcagtgcgcctgcgccgagcccgacttccgccagggctcgattggcttccaggctacttctcccggcccagggagggcctgcgctgtggctagagaagggagtctggtgactgggtgcgcgtgctgatgacgaaatcggaagtgcccggagcagaggcgggaccagaacctagagggcctcgggattgcggaagtttggtggggagggtcggagctctggtggagagagtgttgtctaaaacaagttccggaagggaggctgcccttcgcggtccgagaaccaccggcctccccagtttgagggctgttaccccgtgcgcgcttcgacgttgctgctgttggctctcctcgcccctcgttcccttgggaaccgcctgggaactccgccatgtcatccacttcgcccaacctccaggtatcattgctcatctcccgtccccctagggagctgggatcgaggggaggcgcgagaagcgggtggggggcggggagaagggaggaagcggccgcgcctgtggtcgaggcgcaggagggcgggtccggggacctgcagcaggtgggagaggggcccgttttccaacggaaaggtcgtttctggcccgctcttggggtctcccgagctactggctttgtgagactcttcacttttgttgacacttcccgcttccaaaccagccaagatctgggcaggtttctccaatcagggttaacggagaaagaaagaacgtaatttttgcaaagccctattctggaccagttgaagatagggtggtcatagttcggtcttagtttctcaagctgacagcagaccccttcattctgagctgtcaggtgagtagagatatgggaacagaccaagaatctgagattacagccagcctgcatgcaatctccgtgaagtcattgaatttatgtgcacactcctgtggctcccagatggtagtgtgtaagatcgaggagtattcttaaacctctgtgtggctccacttcccctcctctaccgcaatgagcacagtgttttgtacacaaatcatggaatcttaagattttaggcttaatcgttagtcctctgtggaatggaattcgttcagaaaagaaatttcttaatgtaatggtgtctcccatccccagaatggatctagggcttcagtggcgtttagaatgtaatgtggcttaatgtagaggactcccagtccagtaagtcaataaggcacaaaagagtagcctaaaatacttgtattgagtccccgtcgtggacttccggtagtttgttgaacaagcagttattggagtgcctgacagaggcatcaaaggtaatggaagaactccttaacccatgataattgattctgaagaaagaccactcaaagtagacccacttaaacagagattaaaatttcacacacacatacacaaaaagagtgggaaaggaggcttgcttgggactttcatcttgaaaatcgacctagaagattattaaaataattgttatctttcacaaaatattataattgtataattgcaacaatgactcattttgtggaataagtcaagtgttgatttgtctgtgtttttttccttttcttttctttctttttttttttttttttgagacggagtcttgcacggtcgcccaggcttgagtgcagtggcgtgatttcagctcactacaacctccacctcccaggttcaagcgattctcttgcctcagcctcctgagtacctgggactacaggcacccaccaccacgcccagctaatttttgtatttttagtagtagagatgaggtttcaccatgttggcccaggctggcctcttgacctcaggtgatccgcctacctcagcctcccaaagtgctgggattacaggcgtgagtcaccgtgcccggatgactatctttttcaccaaggttgtattaaactaagattcagcaatcttcacttgagttttttgtagctttttgtagtcctatttggaaaggttctttttggtaaacgtatttggaaaaagcgttggtcatttggtaaaagtatttttcccttgagtattaaaggtgactcttctgaagtgcccatcttgtcatcgttggctttttaacaatttttattccaccagcttttcatttgtcagagactttgcatgtgatttcgatactctacaacataatcttcatcatttgcaggtttttgttgttgttgttttgagacagtcttgctctgttgcccagactggagtgcagtggcgtgatcttggcgcactgcaacctccacctcccaggttcaagtgattcttgtgcctcagcctcccgagtagctgggattacaggtgcctgccaccacgcctggctaattttttctatttttagtagagacagggtttcaccatgttggccacgctggtcttgaactcctgacctcaagtgatccgcccgccttagcctcccaaagtgctgggttacaggtgtgagccaccgtgcccggccccagaatgcatcatacttgaattggactgttggctgttcttcagtgaatcagccagagactgaccaacatgaaaggcataattgttactcttaagcaggaaggatcttgaattgtaattttgttagtggtaggttcacatgtgtgctttctcattcaaccttttcaaccttctaacctaggaaatttggattaatattcatgtagtgattaacttcctgctgaacaaggcaaaaatctctgtggccagatgcttataatctaatgagggaatgcagataactaaaaatcaaaattatataatgtaataaagctgcacagtattctccacttccctgtggttttactttccacagtttcaataacccgaagttaacctgggtccaaaaattttaaatgaaatattctagaataaatagttcataattttgaaacactatgtcacaatgcctgtgtcattcacttcagttcatatcatgacgtaggcattttattatttcacataatcacaagaaggttgagaacagtgcaataagatgttgagagagagaaaccacattcacatcacttttattacagtatattgtaataaaatgtactgggcaaggaggcaaggtctgtgggatgggaggcggtaaggggccaaattagtagagtatccattcaaatgaagtggaaaggattgatcaaaggagaaaaattgaagatggagaagagtcaagcttgtatctgcatttatttttttttttttgagacagagtctcactctattgcccaggcaggagtgcagtggcatgatctcggcttatggtaacctccatctcccaggttcaagcgattcccctgcatcagccccccatgtagcagctgggattacaggcatgcaccaacacacccagctaatttttgtagagacggggattcgctgtgttggccaggccagtctcaaagtcctgaactcaggtgatccacccccgttggcctcccaaagtggtagaattacaggcgtgagccactgctccctgctgtatctgcattttaaaagtgagggaggaggaagagtctgagttttctcccagatttctgggttgggtatctgagtacccaactcaggtagggattggttctgggaatacaaaaggagagctatttggggccagggcaagggagcaaaataatttggttctaaacttgtcgagtttgagatgcttgtggagacaatcaaatggaaatgtccggtgaatatttgcatacatatgtgtagaagtagggagagtggactaggctggaaataaggatttattagcgtacaggtggtagcagaggttgtaggcatacagagtcacatcctggagagtttacagaataaggcaaaacaaagaccacgttagaaattctatggattagcgacagttaaggagagagaaatgggagcctggaaaagaattatgaatcaaaagtaaaaccaggccaggcgcagtggctcatgcctgtaatcccagtgttttgggaggccgaggcagcagatcgcttcagcttaggacttcgagaccagtctgggcaacatggtgaaaacccctctctacaaaaattagccaggtgtggtggtgcatgcctgtagtcccagctactccagaggctgaggtgggagaatggcttgagcccaggaggtggaggtaacactgaggcgtgatcacacccgtgtactccagcctgggtgacacagtgagaccctgtctaaaaaaaaaaaaatactaaaactagaagaaaatggtgtcatgacagccaggcaaggagacactgtcagggtatttgttgtgtgtgttaaatgctgcggagagggagtgagataagcatatgatttggctatcaggaggcagaaagcattgctgtgggagaaataggagatcaggaaactgggatgaacatgggtattctttgggattttgctgtggaggcaaagagatgagtgagatgtagggagaggagaaccgaggagctgaggagtgatggtgtgtagtttgtgttctgcagatgtgagtctgagataggacaacacatttttctgctgagggaaaaaaggaaaggttggagagaacagttgataggcatgtcattgatggagtaaatgtcagcagaggaaggtggggatcagctccacagcagaggagaaagaattggtctcaacagacagggcctgggacacctcttctgaggtaggtaattgtagaatttaccccatttctcagggttttctaaggtggatgtgtctgggactcctaagtggaacaggacaattccacatgttcccaacctttatacttccgtatggataactggatcctgactgatcctggggtgacacagtcattcagtcttgtgtcagccactgtgctagactctgggaatataaagaagtgaagacaacagacagaactgctcttctcctggagcttacattctaatagaagagagaggccaataaattaaaaaaaaacaaaaaaaacatatgcatgctcagacacacacatgcacacacaaagatcatcagccttaagtcactgatgtagggggggaggaaacagagagaaatgagtcccagcccacacctgatgaatatacttcattgtcacataagagaggaagaatcaatgaaggacgctgagaaggaggagccagaatggtgggaggaaaaccagcaaagtggtggttgggggctcagcagaggacagtgtccaagaaggaggaaataatcaactttgtaaaatgtcagaagatcaagaagacagagctggtgtttggatctagcatgctagagagccttgatatgagccgttttattatgtgatacaggaaagagaatagaggccactctggtgagatttttggctctaaaaggtagcagagaaacagaactaacaccgaacagtgttttgtcaaataagactttttaaaggagggctgtttgtatgtcgatggaaatatctagtggagagaaattgttaagaatgacagaagtgaagtaaccaaaaggaagaagatactgaaaaaggagtagggaattttttttttcattcgttaaacaatttcgagtacctgttgtatgccggcaccattctaggcatgggtagctcaaggtgaagtcctgtcctcatggaacctacctccctaaaggagacagccagtgggtgagcatacaggtaaatacaatgacagtgatgggatgagagagtgcagtgggggcagatagcaaagagaaggaatgaggtgcagcctttgctatagcaaattagggaggcctctctaaggacttgccatctgaactaggactgaaaaggagacatcatgcatctgtctggggaaaggagggaagagcattctaggtggaagggttcaactgcttgggctgcctgagtgcaggaggattctagggttcggggagaaccacacgtagctagggcccaggttatttcagaccttgtagatcagctctagcatcaggattttattgtttttaatgggagaccatcaaggttaccttttatgttttgaggtagcaagggtgggaacagactgaccactcacgaggctgggtagtagttttgacatatatgatagcagcttgaactagggtgttagcaagggagatggtgaggattatattcagaaagaaaattagctctggctgaaaagggaagataatgtttgatggaccagagcagatggagctggaagaggggaagacaggcaacagactctgccagtattatctgtctgagactgaagaactccagtcagtagtgaatgataacagccaggacctccagaggctgcaggcataaatgaatgaactcaatgcaaaagttcacctattgcaggaggagctacagctgctgcaggaacagggctcctgtataagggaagtagtccgggccatgaataaggagaaagtgttagtcaaggtgtatcccaagggcaagtttgtcttagatgtggacagaaacagcaacatcaatgacatgagacccaattgccaggggggcgctaagaaatgatagcgacacactgcacaatatcatacccagcaaagtagacccactggtgtcaccagtgatggtggagaaggtgccaaccttgatttaagagatgattggtggactggacaagcagattaaggacatcacagaagtgatcgagcagcctgttaagcattccaagctctttgaagcactgggtatcacacaacccagggtggtactgctgtacggacctctaggcactgggaagacactgtttgcctaggctgtggctcaccatacagactgtacctttgttcatatccctggctctgaatttgtatagaaattcatcggggaagggccaagaatggtgagggagctgtttgtcatggcatgaggacctgccatctgtcatcagctccatcagctcctcgcagctggaggggggttctggaggggacagtgaagtgctgcacatcgtgctggaactgctcaaccaactggacagctttgaggcccccaagaagatcaaggttatcatggaccactgcttcactcagggcacatcaacagaaaaattgaattccagctggacattttgaagatccattctctgaaaaggaacctgacccaggggatcaaccagagaaaaattgccaagcttatgccaggagcatcaggggctgaagtgaaagtcatatacagagaaagcagcatatatgccctgagggaacggcgagtgcatgtcacccaggaggactttgagatagcagtagccagcgtcatgcagaaggatagagagtaaaacatgtccatcaagaaactatggaagtgcggggatgtcctttgtatggatccctccggtaaagctttctggaatgaaaaaataaaataattagctctccagaattaaccatagaagacatggttaattttatttcaaatgaaaaatgctaacagacatggttaattttatttcagatgaaaaatgttaacagaaataaggttgaaatggtattcatcagcagaaaaaaaacagatgcatatcctcttaattcatcgtcttcgattaaaggtttaacgtgtgccacccagtacagtggctgcatgtggctattttaattacataaactcactcctcagtcacactagccacatttcaagtgctcagaagccatatacagacattctcatcatcagggaaaggctggtttaattagcactatgtttggagctagatgcttaaataatacccactgcagtataagagatttaacttaataaaaatcagtgtggtgcctcagtgaggcctgactgaatgagaggaacaagtggctgaagaggtgagtggcacagcatttcaaaatcacctgagaagaaaattatagttaggataagaaagagcttatttctaggccaggcacggtggctcacgcctgttatcccagcactttgggaggctgaggcaggtgtatcacctgaggtcaggagtttgagaccagcctggccaacatggtgaaatcccatctctactaaaaatacaaaaattagccaggcatggtggtgggtgcctgtaatcccagccactggggaggctgaggcaggagaatcacatgaacctgggaggcagagattgcagtgagccaagatggcgccattgcactccagtctgggcgacaagagtgagactccatctcaaaagaaaaaagaaaaaggatttatttctgctatgtggcttaaccactgaggctttgagatgcatttttttttttcttttttgagacagagtcttgctctgtcacccaggctagagtgcagtggcatgatctcggctcactgcaacctctgtctcccggattcaagcgattctcctgactcagcctcccaagtagctgggattacaggcgcctggctaatattttttgtatttttagagatggggtttcattatattggccaggctggtctcgaactcctgacctcaagtgatccgccctcctcggcctcccatactgctgggattacaggcgtgagccactgtgcttggcctcactctgtcacccaggctggagtgcagtggcacaatcttggctgtggtgcatttttatatgaccagtctgacctaaccaccacttgactgtgtgactccatgttttatgttcatatactagctgataaaacttgaaaatttagctttgaatttaggctacttgacctgtgagatacgtaactattacattttatcaattctgaagtaaaccatttatttttcttccctgctacaatagaggaagcatggtcttccagcgggagacctgttcctcccatttacagatctcagcccagttatatccaatccatgctcaactgccccaaaatgtaatattcttacacataattggtttttgcattgtttgaatgattttttgcttatgttatatacttactttttaatatctctaacaactgtcaattttcatttttttttactggcacctatttctgttgaatagttttactacctaaattaacccagttggaatgttttaataagtcatgtttgccctttatttgtatgtatctgtgcataatttttttttttttttttttgaggtggagtctcactctgttgcccaggctggagtgcagtggcatgatcttggctcactgcaaccaccgcctcccgggttcaagcaattctcctgcctcagtctcccaagtagctgggactataggcgcatgccgctacgcctggtcaattttttgtgttttagtagagacggggtttcactgtgttgcccacgctggtcgcaaactcctgagctcaggagaattttagtttgagataattgtagattcacacgcagttgtaagaaatactgagaatccagcattccctttatccagttgtctgcagtggcagcatcttgtagaactgggacaatatcacaaccaggatattgatattgatacattccaccactcttactcatattttcccagttttacttgtccttatgtgtttttatgtgtgtgggtgtggttgtttgtgcagttttatcacatgtagatatgtgttacattttgagagttctttatgtattctcgatactagttctttgttagatatgttttgcaaatatttctcccagtctatagattgtcctttcatccttttaacaaaatcttccagagagcaaaagttttgtcataagatccagttacctttttttttcttttatatagtatgcttttgatgtcaaatctaagaactctgcgcatccccagatcctaagttttccatgttttttctaaaagttttagctgggtgcggtggtgtggacttgtgatcctgctatttggggaggctgatgcaggatgatcacctgagcccaggagtttgaggctagcttggtcgacatagtgagatggagccccgtctcaacaaataaataagaatcaaagttttgtagttttacatttaattctatgatccatttttgagttaatttttgtaggaagtattaagtttaagtcagaattcttttaggtgtatgcttatggatgtctagttcctctagcaccacttcttaaaaagcctgactcggtgccattgactggctttttgcatcattttcaaaaatctcttggctttattagtatggatttatttctgggactttttaaaaaaatgccacaaaagtagtccatgttccttatggacattttttagaagatgtgaaaaagtagaaaatgaaaaatatatgttttatcaaagataaactctgtttaacaatttccttcccatctttttcctgtgctgcttttttctgctgttgtttcaaataaattcctgctacatataaaaagttgtgtcctgctttttaaaaatgcccattattaacactttccatattattacaaatatttcttaatgttattttagtgatcctttggtgttctgttttgtggcatcctttatgatttaagtttccaggttttgtttttgttatttaaaagacctctctgataatatctgtgctcagtaaaccttttagttaattactggattgaaatatatgagtatttttcagattcttgatatttcattgccccattgcttctgaagaggtttcaccccatttacatttccactattgttatatcttttagattaaagcagcatttaatttttgagaatttctctaaatgcttgtttagtttgaattttcacattctattatttcttattagccctaaatttaactttagctaagtgaaaattacatgtaaatgttagcgattggtactaaagtaacattcagtagcatttattcctataacatgtaatttgcatcttttcaacttgtaatttataataaaatacagttgtgagttagaaaaaaatgattttttagttactgtttattttttacttatttttgttttctttcacagcccagcaagctgagaagctttaaaaaaaaaaaaaactttcagtatgattatttacttcaaatttatgtttatgctttgatttaaatgttgttattttgcctccctcaaacagaaagcgatagatctggctagcaaagcagcgcaagaagacaaggctgggaactacgaagaagcccttcagctctatcagcatgctgtgcagtattttcttcatgtcgttaaatgtgaggccataggttatattttatttaaaaacacgaaaaggaaaatttattctgtttcatttctaaaaaattgaaatataatgccagacaattctaaacgatccatttgttaaaaaaaaaaaatactccactttctttctagtgatttttaagtattgagatgtagctagcaaatgtgacagccatcatagttattactttgtatatgtaaacatcttaaaatgtagtctagtcagtggaaaataggttaggagacattctatttgtgtctttacagatatgtattgcgtgtgtaccacgtggcaggcactggggatacaatggaaagaaatggttaagacccctgccctcatagctcttaaatggaatgcagttagatgattgaagatgttcttttgagcttctcccatttagttctgaggttttatgttaaagtgagactaagaatgagtcataacctgtaagctatgtggggctcatcccatctattgcacgtgttgccaaagttcactttgaaaacagctctgacagaggcctttgtgtagtaaaatttacgatgttggtattacacagaatatatgggatttccatcactttactcttctgaaataaagcttttgtagacattcatagaaatgattaatactgctttccttctatttgtcttttttataattgggtttgtctaagacaagcaactttgaactatctgcaaaaatgtaagggaaaaatatgaaagcttcagaatattaaataatttcctgttagttaacattaacttaatataccctgctgtcttgcttaggttgtttctgattcagacccactgttggtctccaaccctgctggaggaaggggtagaaaagaggtgataatcattggctatgatgagttagagatgatcttccctccttcttccaacatagaatttccttgtctgaaaaaatacatatttaagagttcaaacctttctacatagaatactaatggaaaaaaatctctctcatttccctttaatagatgaagcacagggtgataaagccaagcaaagtatcagggcaaagtgtacagaatatcttgatagagcagaaaaactaaaggagtacctgaaaaataaagagaaaaaagcacagaagccagtgaaagaaggacagccgagtccagcagatgagaaggggtacgtgtttaaaattgttcaattttattgtggctttttgctttcgatttgtgaaatttcttttgattaaaacaggtgtcagcaaactatggctcatgggccaaagctgcccagctgcctgtttttggaataagctttatcagaacacagccgtgcccattcttttacatattgttgtctagggctgctttcgtgccgtaacaacaaagttgtgtggttgtgtggagaccgtatggcccacgaaacctaaaatatttacttgtttggtcctttacaaaaaaaagtttgctgacccctagtttgccaagttgaatggataatattcctcaaacaacccttcctgactgcctgctagtaggaggagagaatgcttgtaggaatagtactcagttactctctggccattagctaatatggaagcttaaggttataggagtgaccagagagttaaacctttgaccacatggaaaaaatgaaaagtaactccaacaatgtaaattttttttggatatcttatgcaaaattttttgatgtgaatttgtgttagatttgctttatgttgtcattgtaaagaaaacaacacagcataacttataaacgttgaaactgatttttggcatgtcttcctagatgggggatgtatcacttctagatgcagaatttgtttattcagtacatgacatatgcgtgccaagtttgtgctcagcactgggaacatattctaaccacatcctctctggctgtcctattaattgatgccagtagttccaggtaacacacccttaagaaaatgagactctgggatggagttatctggcctgcttgggtttgaaaacagcgagattctgctcagctttagaggatgtggttctcattgttcatggtatgcagtggcgcaggttatttagacaataccctgtggtcacaaggaatgaagtgccttttaggcagtgctttggggcttcgtggctgctaccacagaccatttggaagtacatgaggaatataagaaccagtgttgacttggctgcttcaaactatgtggcagagtttgaaggaaatgataagcttaagctcaaggttttatattctctgttcaagatgtgatcggggaaccagggagtttctgtgacaccctaagaacatgttatcttcttcatcgatagcactgacttaacaaaaatcagatgatagtctgatcttacaaattactgaattccaacttagggtttcttatatgaaagtgaggacatttggtataaaacagggactccaaacatgaagtgaaaatattgggaagaatttagttgaccttgactgcccaggacctccagctgtcactgagactcccttgacagcagaagcttctcttcccttgtccatagaagctcttctctcttgcttgaaaaccctgtaaggatctcttctgagatgattacctgacaaggcgatgccagtttttcttttgtactgaacagcaatcttcgtttacagtaggacccactttggctaatttaagcaaaaagggatatattatagggtattaccttacagaatagtggggccagggaatcaggagaaatggccaacagtaccagggttgttcaagtagggatcccactgttgccaactcctctgctaagcactgatggtgcttgggagcaggtagtaaatcctctgcgcagctccctcagcaaaaccagtgccttcgcctgaagattctgtctccttgtgagcagcccccaccttcttggaagaatttaggtctcatgtggaaccctagctacaagggagatgagaaacggcagggttttttttgtttgtttgtttttaataaggacagcctttatagtactggacagcatgatagaaagaggttggagtgagtgtcatgtgaatcttttgcagtgtctacctcacccacagccccaccgtcctatgataaccaaggcaattccattttggcataaaacatgtcatgcttttatctccctttatatgttattgttttaaaaatgatataatgccttatttttggctttatcacttttatacttaacattgtatcaggaatatctttccaataaactatttctacatcacgtttaaatgttgcaatgtatcctgtcatatgctagtccctataatatgagttactttttccccttttgcaaacagtgtgggtgtgattatccttatggtcaaatgcttgaacttgtctaaaattatttcctcaagataaatccctagatatgaatgaaatgccttgatcgacctacttgttctttgggtgtagttcattgtcatcaggaagcttcctctgtcctttggaatccccagactaagggttgtagacctttgtaccttagtgttccagatttttttcctcctaatatgacctcttgttctaatttatatcttgcccagtcctgatgtttttactgttgttgtttgcagctctcctgtgattcatcttgaatccttcatggagtgatgtgtggggcatgcatttatgaattaatacatacctaaatatgtcatgggaatttggagctagttcctgacttcattctggtctttttgtccctttcttttacatgattctctattgatgataacgtgactgcttcttatttactacattctttaaaataagtaagcataacttttaatgtaaatgtctgattttgccactgaaattacaaatatttcaggttaatttttccttcatttttgccttatttgatagcaatgagtgatcatttgaatatattaaattctttttattaggaatgacagtgatggggaaggagaatctgatgatcctgaaaaaaagaaactacagaatcaacttcaaggttgctttagatttcatttttaaatttactatcctattaaaaagactcaaagtgaattgtctatttgaattgtttttgttctccctctatatttaaatgaagtttaagaactggctttggttcccaatagtcatgtgctggctttgtttagagtgttttcttagggtttgccctctaggatcatggtttggtcttttttatgtaatagttttgttggcttcacatctgcctttaaaaggctctcagtcaacttgctctttctttttgtttatttgccgccttttagagaaggtaacacttatactattagcacactgcaaaatttgatggtattaaaatttactactgtgggagaagttaggacttacacgtggcttttattgccgttgctgtagctcacttattgatggtttattttgtttcttaactgctcttcatctgcttttcagtgttcctgtttacatttaattgtttaagctttctgtgtttaccatccacacctgtaaagccctttcattctgttctactatagcacagtggcataacagaggggacataggtttttggctccattcagatcttgattctgttcaagggtctgccacttagaactttctaattgtgggcaagtgactgaatctctcagaaccagcgtcccccatctctaaaatagaaatgagcaatagcttcctttcagggcttttaagattaatgacagtgtaaaaactacctcatatatctgacgaagtctagggactcaataaatggtagcactgtttatctaaaaaggcatctatttgttggctggctttgttaatcactgagatttgattattcttcgaaataaattatctaacaatttttcagattgaattttttgctcacccattggtagtatgtattttgttcatttgaatcttaccaaatagaatgcataactgggaaggatttccattttataggttcagccttggttactgaatagtgaaaatacttacctgagccaaacttttagccttgctatactagtgtcttcgttttggtagtatttttgtcttgcctaccctactgggatgtctaggaaaacactgtaaggataatgtgttgacaacagaccaggtaatgaatagagaacatctttagatgccaagaacttcagtggtagatatagtccaagggcaaaatcttgagtttacactcaagcgtagtggtgtccccaccacctgaaactactggcacacactgcgcactcagttggcatttattgggtaacccagtgggtctgtgccaagtggccttattccagttgtaaagcaagacactttttttgtctgctctattggatttggttttgtttccctctccctaccctgccccaggtaaaaatcagttgcatatctttaattttcgaaaagatacattttttttttcttttttgtttttttgagacaagggtgtcgctgtgttgcccaggctggagtgcagtggcgcaatcacggcttactgcagcctcgaactcctgggttccagggattctcctgcctcagcctcctgagtagctgggaacacaggcacacaccaccatgcccggctaagtttttttttttgtttgtttgtttgtttgtttgtttgtttttgtagaggtggggtttggccatgttgcccaggctgctctcgaactcctgagctcaagtgatttgcccacttcagcctcccaaagagctgggattacaattgtgagccaccgcacttggccgatacaaccagtttttaatagggatttctctaaattccctatcacttacaataaaggccagaaatgtaaaacaaacaaataaaagagaaaaaaaaccaaatacttaaaacatttaaatgaggaaatgtatttgaaatttcaggatgaaatagaatatgaaaggagtcctagccttttatatttgaatatccttttttttctactttttaatggtttgctgctggatttcatactattgtatcttttttgaatttttccttgttttttgaacagtattttaaatcttttacttctgttttagattatgatattaagtgtatatttgttaaaattaaaaatcggtttgtgatttgagttttctgttagctaattttattcagtgaattttttgtgattaagtaatatactagtaaatagtatagtcaaagaccggataaatttatatcattggaagtacattccatttgttagcatttttcataatcccatcccccctttttaattttgcaaaccatgtctagtatgagattgtttatcagtaaacattccaaagtcaccttttaacttagaagtattatatatgaaaacaaatcatgacacatttttaaaatttatagcagaaatcttgagtcagacggtatacatatataaaataaagtttatttttgtttaactgacatgaaatcctaggattactaatcttaatgaaacataaaaaagacgaaatgaatttacttttttcttactttatagtagtctgaacttttggaatacaaaatgcttatggtttcatgtaattttaatctagtagctaaagattttcataatttagggaagtaagttgctagtaactagtcttagagtaacagattatctttcctaacaagaagaaacaatcagtagcagtgatttcataaagtaatagattgtataagtggtggtgttctgttacacttaaaacaactaactacatgtcatcttagaacaggctgcttcatagtttatagtggaacagtttccatattctagaaaattagaaaagcttttgataaaagagaactagaaaatttgtcagtaggctatattaaaagacatccttcttggactcttactgcaataattgctttggcttttgaatatactgcattcagaagctaaatcttccctgtaagttaactttgttaattaacaaaagttgtaaatagatctatttagcagccaaatagaaacttgggcaaatcttaggaaagtattgcaaatctgcaggggtatcttttctcggtttcccatcatctgcttccattccttcctttcctctctccttttccttctcccttctgtctgtctgcctatcttgagttaaatttgttaagcatattttttttttcagtggttgaggagaggattagatcaccttttcttttggttaacaggagaaatggtagaacaagtacttttgatactccaaaatcaatgtattcaaatataaccaccttatggaacgtttggtgcttttccaaacactctaatattcattatgtcatttgattttcgcaccaacctatctaagtagtttgggcagatggtattattttcatttcacaagtgaggaagctgaaacagaagggtaaagtaacatgccccaggttgtctagtcatccacctggttcctagtcctattgactactccctaacacctgcttcctgctcacgctatttcaaaaaggttgttagtacataaaactttcccaattttataatgcgtttctttaacatcattatttcatgttgtcttctaactttggtgaaatagtctttcttaatttaaagataacgtaattttttgcaggtgccattgttatagaacgaccaaatgtgaaatggagtgacgttgctggacttgaaggagccaaagaagcactgaaagaggctgtgatactgcctattaaatttcctcatctttttacaggtgacataacttttaaataattttatttcatgagtttgtaaaagttcattgatgactgaggtgaagcattgtcattcttgtcactaatgaattatcttaaataaattgtgactgttaaaaggtggtgatatatctttatacaagatgttttatttcttatacatatccatatttgcagtgtatatatattgcaaaacaacctaaatgtcaaccagtagggtaattcaccaacatgcagtggaatactatgcactcagtaaaatagagtgtacatctacattaataaattgaaatctgcattgtattttattgaagaatgtccacatctattgcaaagatcaaaaagcagttataaactgaatagtatgattccatgtttgctaaatgtgtatgctgagaagtaagtatagttagattcacatagaaatattaatatatgcctaggggataagattataggagatttttacttttgactttcatctgaatttttgcaatggttatgatttttaaagagtatttcttaaaaagaggagtaagaatcacttaacagtttcagaggaagtgcataacctctagtagcaaaaggacatttcattatcactgtgaagagaatattgctgacctaccatctggggaaacttacaagttctagttccagcagtaagtgatatgtctgtgctaaaccattcctttatattatccttcttgtgactgatagccttgactgtaatatggccacacccacagtctgacagtcagaggtttttccttttgcaaacatgttggtttatgtcaacagcaaatctgcaatgttggcctcagactgaagagtccagacagtcgtatcgtatagagcagtgatgaagagcaaaaagcctgtaggccacgcactgtccgcctagcttcaaggtgcagtttactacccaacttcaggagtatgaaacttaacagcataaaagttgacatcataatcctataaaagcacaaaaatatggttgaactcattttatggtatattacttataccactttttctcaaacatgagtcattgatgtatcatcttcatgaatttttccatgtatgtgtaccattactaatttttaatatttttctttgcttattttttagaacaacatttttactagagtatagcataaatatacagagacatacaggagcccctgggtgttgggcttccttaattgtcacaaagcaagcatgccagtgtcatcaaccagatccagaaataacagcattgccagggacctggcaggagccttctgcctcattcctcccgagaggtcatctctctctctcgacttctaacgccagagattattttgcctgtatttgaactttaaatcatctcacatatttttacttagtaacgttattgaaaagactgctttgtgcctttataagtggaaaaaaaagtgtttttccaatacacattaaaaaattatttaaagtatataccacctaaaagtacttcatgttataccagtggtatatgtaccatactcagacactgacttgtaaatgtatacatgtaaaataggaaaatgaaattcaagtaacagttgctttcataacagttaagtgaaacagtgttattcatctgcatatcattcttttgcagatactgtgtacacatccatagtttgcacctagcagttttttttgttttgttttgttttgtttctttttttgagacagagtttcactcttgtcacccaggctggaatgcaatggcgtggtctcgtttcactgcaacctccacctcccgagttcaagcaattctcctgcctcagcctcccgagtatttgggattacaggcatctgccaccacacccagctaatttttgtatttttactagagtcagggtttcaccatgttggccacagttgtcccgagctcctgacctcaggtgatccgcccatctcagcctctcaaagtgctgggattacatacatgagccaccatgcccagccatagttttttaaatgtatgtttgatagtttactgccagctgtaacccacctgttttattttaggcaggattataattgctcattagcaaaattgaggctcgaagagttgatgtattcactggttatattttggcaaaactaggatttaaagtagtatcacctttttgttacccaaccatgaaagtctgctacctagctggaggctgaggtgggcagatcacctgaggtcagaagatcgagaccagcctgaccaacatggtaaaaccccgtctctactaaaatacaaaaactagccaggcgtaatggcgggcacctataatctcagctacctgggaggctgaggcgggagaattgcttgaaaccaggaggcagaggttgcagtgagccgagatcgcaccactgccctccagcctgggcaacaagagtgagactctgtctcaaaaaaaataaaataaaagaaagtctgctacctataacactaacctgtgctttcctgtggaatcaagaattcagcagaaactcacaagtcatccaaactttgttaggttcacttttccaaagagcataaatattcaaagaaaatctcttccagctgcccattttttatggatataatttttgtacaatattctggtatcaagcagtgtacacagtagatgatcagaaagtaccttttaactgaactcttttcccctactagactccacgcagggcagaaatccttttgcctgtgcacatgttacggttttgatacatattggttgaatgaatgagcaaacaaatgtacttcctgttagaaggcttatgttatgcaagtctctttttgataaagtagtctctagaagaaacaaaatatatttaagacataccttagattgatttatttttaaaatattgttttgatccttagaggtttagagtgaaaatctttccagagtattcctcagtatagatgatacaattaagtgttaaaattctcatgacatttttctaaatctaaattttaggcaagagaacaccttggaggggaatcctattatttgggccgcctggaacaggaaagtcctacttagccaaagctgtagcaacagaagccaacaactcaacatttttttcaatatcttcctctgatcttgtttctaagtggctaggtgaaagtgaaaagtaagtagtaaatcaattttttaaagttttttctttgcctgtaattactgtatcactccttaatagatttcttacatcacttatagatattcagagaagtcatgtaatacaggtactcacttctctgtcaaatcagtctctaatctagaatttcttttgtgggaaaagatagcatatatctacaacctagtgaatcataaagtgaattatccagttgtagcattcttattttctgtacctgaaacatgattaggctttttaatctacagagttcttgtaatattgatatattactttgttttaatcttttactattttttagagacttaaaagttttcatttatttttagactggttaagaatttattccaacttgccagagagaacaagccctccattatcttcattgatgaaattgattctctctgtggttcaagaagtgaaaatgaaagtgaagccgcacgtagaattaagacggagttcctagtgcaaatgcaaggtagtgttactaattttttttttctttttgagacggagtctcactctgtcgcccaggctggagtgcagtggcgcgatctcagctcactacaacctccacctcccaggttcaagcaattctcatgcctcagcctcctgagtagctgggattacaggcgcgcaccaccatgcccggctaatttaatgttactgatttttaaagtcgtttttgtttattttataacaatttttataacagtaatgaaaaattcaagcagaatttctccattctaacaaactgtttcattttgccatgtttcattccaattgtcttccatatgcatacataatttttactcaattgtaattatcttgtaggactcactgacataaatagaaaagagatttaatgtattcatttataatgtaccaggaacaacttcagtaaaagtaatatgtagacttcgaatgaaatttttcaagaaatattttgaaacgaatgttaatagtattttccacaatctgggagatttgattcatatatttgcatcatattgcatcatagtgtatttggatcatattgccgtaaggtgatatttgattaaatacagttcttttccaaagacagactctcaagatgaagcactttaatggtaaagcaccacatttcttaacagaatatatggaagaagtttaaagaacaccaaaatgacaaattaattaaagcattacctattttaatgcaggggttggtgtagacaatgatggaattttggttctgggagctacaaatataccctgggttctggattctgccattaggcgaaggtaggataatatagtaaatatcttatttctcactgcagatgtaacaagtagatgataattctctttttgtcttgtcaggaagcattctaacaacttttcaaaagatttgtaatgtgctctaaccctgttgctcccctgccttgagtgggagaagggtggtcatttgcttgtttgtttccctagtttatcaaatatacaagatttccacacacttctgtctttcatattagaaaatatattacctaatgcttacctttcattctgattaagtttggtgggcactgatgcttcaaaaatttataaacatagtttgacaattcagtaaaaaccatttatataaaattttagcaaaatggcaattctataagtcaaaataagataaccaggtaagattttttttttttttttgagtcggagtctcactctgttgccaggctggagtgcggtggtgcgatctcggctcactgcatcctccacctcccgggttcaagtgattctcctgcctcagcctcccaagtagctgggactacaggtatgcaccaccacgcccagctaatttgtatatttttagtagagacgagatttcatcatgtggccaggatggtctcgatctcttgacctcatgatccacccgcctcagcctccgagagtgctggaattacagatgtgagccaccgtgcccagccaagattttttttttttttagtaaaaactatatgtcaggccgggtgtggtggctcatgcctgtaatcccagcactttgggaaaccaaggtaggcagattgcctgagctcaggagttcaaaaccaccctgggcaacgtggtgaaaccctgtctctactaaaatccaaaaaaattacctggccatggtggcgcacacctgtctgtagtcccagctactcgggaagctgaggtgggagaatcgcttgagcccaggaggcggaggttgcagtgagccaagattgtgccactgcactccagcttgggcaacagagtgagactccatctcaaaaaaaaatatatatatatatatatatgtgtgtgtgtgtgtatatatgtatatgtgtatatgtatatatgtatacacacacacatctatctatctaatttttaagttgaaaatgaaacttcagttctaggaaaggtatacggactcttcacttttcactcttcacagttctgtattacattcatttattttgtatggtaaaaattagcacttcagtttttgccacttttatcccattcacttgatgatttgcgccagcattctagcttaccatccagtaccaagaaaggaaatgtgcagggtatttttgaaaaattgccttattctgcacccatctctagaggcaacggaaactttaaattcttttcattgtcacagagagttacctggagaaaaaacagtctgctcagaccacttaaattatccctcatcgttgcttctctgtctccaaataccgaaattctaagaaagcaagcaaaattattgttaatgaaacatagtgtttattctttataatataggattgttctggatgtattcattaaagtggacattttgtgtaatatatatcctataagattgtgaggtaattctgttttgaatgtagagaattactgtgtcatctctactcctgttttatattgttaatcattagtcccttgatcaagagttcagagtacaattttgtgggaaactgtaaccctgtaggacctctttttatttcatgaattccagacataggaacactgtggccaaaataacccaaaaatgcacgaaagattcagccacttcaaactggctcccaggctattttgattttatttgtttgtttttaatgtgttctggatattatccctttaacctaaatatatatgtttaaccttggcacatacaggcccacttaacttagtatctgtttcttcttggaaatatcctaattttcaattaaatatattcttgatgtaatttctcttttaagatttgagaaacgaatttatattcccttgccggaaccccatgcccgagcagcaatgtttaaactgcacctagggaccactcagaacagtctcacggaagcagactttcgggaacttgggaggaaaacagatggttattcaggggcagatataagtatcattgtacgtgatgcccttatgcagcctgttaggaaagtacagtcagctactcattttaaaaaggtaagtcatttttatctatcctttcctatcttttttttttttttttgagacagtctcactctgttgcccaggctggagtgcagtggcactatctgggcttgctgcaacctccgcctcccgggttcaagcaattctcatgccttagcctcctgagtagctggaattacaggcgtgtgccaccacgcctggctaattttttgtatttttagtagagacaggatttcaccatgttggccaggctggtctcgaactcctgactccaggtgatccacccacctcggcctcccaaaggcgtgagccactgcgcctggcccttttcctgtatttttaaaatcaagtttcaagaccgtcattggtttgtcttcaaagaatttgggaggatttcagtgttgtataataataccataagtgggtttacataatagacatatttctgtgtcactgaaacaagttctttaataaagtttatttattggccatttttggctgggtgcagtgccccatacctgtaatcccagcactttaggaggccgaggtgggcagatctcttgagctcaggagagaccagcctcaggcaacatggcaaaaccccatctctgtaaaaaatacaaaaattagctggatgtggtggcacactcctgtagtcccagctacttgggaggctgaagtgggagaatctcttgagcccaggaggtggaggttgcagtgagccgagattgcaccagtgtactccagcctgggtgacacagtgagaccctgtcttaaaaaaagaaaaggccttattaatcatcctaatgtgttttaaattttcctatgaaatgatttttgaagtatttgtgtattattttgatataagtatagaaacttaaatgtacagatgtaaggctgcttctgacacatctagaatatttttgagtagaatctggtgcatttatacctcataaagtaaaaataataatagctaatatcttttaaatattcacatgcctggcactgtgttctgtcttttatcttactatttcatttggtcttcacaaaaatcagcaagagaggtacatgtagccagccacctaatggtggttagtcttggacgtaggtgctaacacagtagctagagtgggacagacatgtgatttgcctggaggtgaggtgtgtttccaaatctgaaatctcagccattctgctatcctgcccctcctgtgttctgttttgtctgcaagaacaagttaagcatctgtggctgagataaagttttataagaaggctgtggtcttgagatacccagtttgagtaacaatgaactaggtaatctggaccaacccttttgctgtgaacaacagtatccagtattactcatgaacatacatgtgaaaaactattagcaaacctaatctcataatgtatgtcaagactaatatgactaagtcacatacgtatatttatcatgtaccataataagatttttttaagttaacaagcttgaattaaaatctgaatttgaagcctggcaccatttacttgttatacctttttgagcaaattctattacttctttaaagctcatttttatcatttctaaaatggggatgtgataatgctattttgaagtcctttccaataatgaagtgatataatactcataaaacaccagtcgtggtacttcagatgcgtagggaatgttactcatccacccttcttcagccatttcattactgaagtactgttaagtttatgccacagccattatgttttttcttaaattctctttgccatttagaaactataaatgcataggaactcagtcctttcctactgagagtttgtcactcaattctgcatattactgccagggtgagctcacatgacgctgaagccaggtccttgttagtgggatgaaggtgacacagccagatgagttttatctctgcagctggggatcaccagctgcagcagacctctcagcggctccatcctttacttcttttaaagctgattatttcagttaacaagaagaagattccctgtttattttttgcatttactagtattttatttctaaaatactaatctgggaccggtggtagatcagaaagtagagcagtcaaaaaagacaaaaatccctgacctcatgcagctaaaatattagtgagtaaagacagtaaaatacacataataaggtgagagcatgtatttcttcacatctacactaatactgagataatatttaaagtcgattattgtgaaacagatgtgaaagtgcccccaagttggctgggcgcggtggctcacgcctgtaatcccagcactttgggaggccaaggtgggcggatcacaaggtcaggggttcgagaccagcctggccatcatgataaaaccccatctctactaaaaatacaaaaattagctcggcgtcagggcgggcgcctataatcccagctactcgggaggctgaggcaggagaattgcttgaaccctggaggtggaagttgcagtgagctgacatcgcaccactgccctccagcctgggctacaaagcgagactccgtctcaaaaaaaaaaaaaaagaagtgcctccaagttgatgcagactattgccatctaaatgtttacatgtgactatgtcacaaagattctttttctggatattgttaaaacttataaataagttgtacatgataaaatggcattgatactgcatttagcatacaattttgcacttagatttgagagcatttttgttgaaagagattcagtagtttcatactaaagttccaaatattacagaagtttctcagctatagagcaacttctgagaattttttaatatatctgtttttggtctttaagattactaccacttattaagcactagaggggaaaaagagaaagccacaggtaactattttttttttaactcatcttctatgtgtgatcatacaagcaatttattgtaggaaatttcaaaatatagaaagcatcaagaaaaaaactaaaagcagctgggtgcagtcgctcacacctgtaatcccagcactttgggaggccgaggctggcggatcacaaggtcaggagatcaagaccatcttggccaacatggtgaaaccccgtctctcctaaaaataaaaaaaaattagctgggtgtggtggcacatgcctgtaatcctagctactcgggaggctgagggatgagaatcccttgaacccaggaggtggaggttgcagtgagctgacatcgtgccacttcactccagcctggtgacagagcaagacgccctttcaaaaaaaaaactaaaagcaaccaaaatctatcccattacccaggggataactactttttgttgtatattcttaattttttttccaaaagtaaacattctaataaaacatacaaaactattatacattttaactttcctggtaatggattaagtcttaatgttcaattttgtttcaaatacatatttcagattactgtttatttcaggttcgcggaccttcccgagctgatcctaaccatcttgtagatgatctgctaacaccttgctctccaggtgaccctggtgccattgaaatgacatggatggatgtccctggagataaacttttggagccagttgtttccatggtttgaaattttgtttgtttttaagaaaatattttaaaacattatacttcataattttcagttatataagatttgctggaaaatcttagtataaacaggtgtattttacttaatattgttgactcattaaaaattatgaagttaattgaacttaaaatataaaaagtcattatttttaaactattttcttgggtttagaggaacctttaagtgaaaaagctattttttaaagcacaagattctgactttacaggtcttatagctagaatatctccaaaatgctcatatatagtataattattgtaaagacctaactaaaaaatagggttggtgaaatattttttttcccctgcatctcagattttttaaaataaccagaagtcacctgtaatcccagcactttgggaggccaaggcgggcagaccacttgaggccaggagtttgaaactggcctggccaacatggtgaaatgccatctctcctaaaaatacaaaaattagccaggcagtgtggtgcacacctgcaatccagctactcagctgaggcaggagaatcacgtgaaccagggaggcagaggttgcagtgagccgagattgcacaaccgcaccccagcctgggcaacagagcgagactctgtctccaaaaaaaaaacaaaaaatagggccaggtacggtggctcatgcctgtaatcccaacactttgggaggccgaggcgggtggatcatgaggtcaggagatcgagaccatcctggccaacacggtgaaaccccatctctactaaaaatacaaaaagttagccagacgtggtggcacgtgcgtgtagtcccagctacttgggaggctgaggcaggagaatagcttgaacccaggaggcggaggttgcagtgagccgagatcataccactgcactccagcctgggcaacagagcgagactctgtctcaaaaaacaacaacaacaaaaacaaaaaccagaaatactaatgcttgtatcattgtttttatagtgttttctatttcacttctcaaagctccatagaaagtttaaatattgtagttctatttttatttttaaaaattacagttaatatagtttatattggaagaattaaaataatctacaagacttactttgcaaggcatgttatttttagggaacttagggtgattgaaaagttgtttacttacagaagaacattctcagttttcaaaattttctgtcagtttcagatcttcaaagacctttaatggcaggtttaatagtaacttccagaggagaaacttttacacggtacatagatatacatgtaaatgtgtatacacccatatatttgtgtgtgaactaaccataatgcttatctgagaagttactcagaaacccctttgttttaatccttggtgtattattttttattttttgtactttgttcagctttgaagaatttttagtaacttagagtggtccttttcattatttttcatatccttttacaggagtctaggcttagaagttagttttttaatgaatctctgatattagcatatttttctaaccatttcgatcttaattgtaactaattattttaaaattctggttagtagatttttcatagaatggtattctgcttcacttaagtgtaagtgaatgatattttccttttgaattatactgacttggaaaattgatctcgtttaagaaaaagagataaggccagaaattagatcatgaacatactttggaggccttgatcctcagactaaggggattgtccttctgataagtattggggagccatttgatcagttcaggggaagaaagtatacgtttctacacaaaggaataacatgatcaaagatcatgaaagatctgtgaaagaataggggccgggtgcaggggcccacgcctgtaatcccagcacttcgcaaggcagaggcaggcggatcacctgaggtcaggggttcgagaccagcctgaccaacaaaacgaaaccccatctctactaaaaatacaaaaattagccaggtgtggtttcaggtgcctgtaatcccagctacttgggaggctgaggcaggagaatctcttgaacctgggaggcagaggttgcaatgagccaagatcacgccactgcgctccagcctgagccaacagagtgagactccaactcaaaaaaaaaaaaaaagaatagggagtttatcgttagtatcttatggcagactgcaaatattcatatttaaacttaggttaaagttcatagcaataatgataatatgacggttttttattttgttaactctattattaatatcctccctacccttctttttccctgacagtcggatatgttgcggtcactatctaacacaaaacctacagtcaatgaacatgacttgttgaaattaaagaagtttacagaagattttggtcaagaaggctaagccaaagacaaggaagatgcttaccatatgtattctttctttcatagatatttttgtctatttggatcgcattaattgtttccagtaaaactcttttaccacagggaaatacacatctcacttcagagttccattaggttttatattgtacttttcctccattacttattaaatactcctattaacaaaaggtacaaaataacaggttatgaggaaatgagcgatatatgaacggcataaaaacagaaattacccagtaaaaaggatgtcagaaattgacatacaaatatttacaatttttatgaatggtggtctttgcaaagagcatttatattttcttttttttttactaaaatgatatagggtttattttatattttcaaaaaaattgttaaacatcattcttatcaatgtaaaatttacgttattaaaaaattacaaatgatagaatctttactcagggatgggcaataaaacagcaaagagctttgtgattgggtttgaaagattttgaattatagacagtgctcttaatagtttttaataagttgatatttttttctgtgtagatttaaataatttctttaaaagcgtaagctttggctgggcatggtggcttatgcctgtaatcccagcactttgggaggctacgatgggtggatcacctgaggtcaggagttcaagaccagtctggccaacatggtgaaatgccgtctctactaaaaatacaaaaattagctgggcatgatggcgagtgtctgtaatcccagctactcaggaggctgaggcgggagaatcacttgaacctgggaggcagaggttgcagtgagctgagatcgcgctactgcattccagcctgggcgccgagatagcgccattgcactccagcctgggcgactgaataaaactctgtctcaaaaaaaaacaaaaacggtaagcttttatatttaattaactgatacctttcactgtgcaatctcaagaggaagattttctaaattagacattgtctttaccttaaagaagaaaattgtctatttcagtgtcttttttagcaagattgaccaaaacaggtggtaggtgtgtaatttttaactgtcatgaaatactgtaatgcgcacctttgctaataaggaaatggtctccctttgaattatgggaagtttcttgtctgtgatatggggtgtctgtgtacatatatgtatatttccttttttaatacaggataataatatggggtcttgtccttcaccttttaagttcagggaacagtttgtcctgaccacacatatgttatcagtgtaatgctttatgaagctttagaaatgagctcatgactcattaaaaaataataaacgatgctattttaatattttcaaataaataatctgaggatgtgtttcatactttagcatcaacgctgagttgtgccttgtagaattgcattgtctatacatgcaaaagactattaagttaggatgaactagattccctaattacagtgaaattctatcttgcaaatgctatagaataacttgcattttaaagtgtatttgcacattttacatatgctatgtggttgcctttgggttttctgtacagattgtttttgttattaaatggaaaaggcctgaattatgctcttatgtgaagtaaattgatataacctattgactgtattctgtgtattattctttattttgggaccttctgtgtaaaagaaaatattacctaaattggttagatacaaagaaatcattaaaattattaatgtatatatgaaaattctgtttttcaatgacttttatgtgaggattgagaactaacttagtaaactaacactgaattctttgtggataagataatttatacatcttacctgtttatcagcctcagaattatacagtactgctgtgtgttctttatggacagatactcaaaggaatccgaatgggcatgttctatttctctggctcttgaccagtaattataaagtttaggtagacattttctgagccagcaagtagatcatagttgttaagcatctctatgacttacaccctggatatttgaaagcattttgtctcaccctgagaaatctataaggactctataattataaaacatgtcaatagagaattgacttctgagtccactgtcaactacatgcagaaaaacagaatgagtgtacttgattagtgccacagaagcaccatttagccactttcagagttgataaagaggcatacctacctgatggtgctgtatgttgcaagtgaagcaacacagtgcccattgttgacactaatgttattttaagtttgtgagttttcacaggtgcccttttctttcctactttcatcccttcatttgtatcctcctcttattttaatatggtatctttcttttttttgctagtccacatcacgtatttccattaaaacctaatgatgatgaaccatgtaacctcttgcaggaagaccacccaaactacccccaccctacttttgggtttctttagcagttaaattgctgctgctgctgtgttaagatttttctctggagcatgttctattgatcatgtttagatcatttagattgtaagttctgagagttacattttccccagcaattaatatagtgttgagtgcttttaggtacttagtaaagacttggggaaaaaaaaagggagttatatttttattttgatctacctcatggattatgtgagagacttataaaataggtaagtttataaagtggctttgttcttactggtctagtgaagttatgataaatttctgtctcggtgattgagaactacacaatcaaaaatgtattcaaactagctcaccctggcccaccaaaaccgatagtacatctttcccagctgcgagttcagtgacctcatactagtaatttaaagtctgctctgatgggaatatttataccatagaaaccagcaagagttcagttagccgtaaaaaatcaaggactgcctgtaacttaaaataggaagattaatactatttactgcatttatggaaataaaggagacaagttctttatagatgcataaaaagcaatacaattcagcacttgctttttttttaactgcacaaactaggaatagaagggaacttcttaatagaagaagttctacaaaaaaaacctagagccaacatatttaattgtgaatttttgaaaagcgtattcctccagagatcaggaaaaaggcaaaggtgcccactatcaccactttttctcaactttgtacagattctagccagtgcaagcaaaagaaatgaaaggcttacagataagaaataaaattgtcattcacagatgacatgattgtagaaaattgatataaacgtagaaataatgtgaatttaacaaggttgcaggatacaaagtcaaaattatcttagcaacaattagaaattgaaattatgagagtggtgtgtgcctatagtcccaactattggggaattgaagtgggaggatcacttgagcccaggagttcgaggctgcagtgagctattaccacaccactgcactccagcctgggtgagggaacgagaccctgtctcaaaaaaaaaaaaaaaaaaaggaaaatactaattacaatagtatcagagagcatcaaatgcctcaaaataaatctgctcaaagattggtgagactgacttgtagaaaaccatggaacgttaccaaaagacactaaggaagacctaaataagaggagggatcgaccctgtttatgagatagatgacttaaaaaaacaaagtcaatttaaccaaatcaatttatagatttaatgcaattccaaatctggatctgggtggttgatacaaagggtgtgtgtgtgtgtgtgtgtgtgtgtgtgtgtgtgtgtgtgaaaactcatatgctttacgctgtgcatttatatccagatacatagatatccagaaataggcactaaataatttactgattcttaaaaatcttttctagtttgtttttatgatagtgtctcctaagtagatttttctgtccatccatccataatcattcatccagaaatctgcatgttcacacagacatctggaatgacttccacataatgctcatgatgttattagattgattttttttttttttaacttactttacttcttgtatccccttcaggtctattccgatgtctctttttcagtgaaaccttccttggccatcctactgaaaatgacaaaccctcctgatgctccttatccccatccctggctgtatttttccccatagtgcttgtcatctaacatacgatataatttactattttccttacgtgatttctcccactaacaggtatgctatgaaatcagagtttcttgtctgttttgtcctctgctgtatctccagtgtctagaagagtgctggtgcctgatgggtgttcaacaagtgtttgttgagtgagtgaaacttactttgtattcttcctaaatttgaacaatcagcatgtataatttctgccccccaccccccagtgttcttctaaaaagaaaattaggactgaaaatacctcaagaaattaagtgactaaattctggtgaatagaaatatggacacttttattcttttctttatattttatctttatttttaatttctcaaaatgaagttttaaggggctgggcgcagtggctcaggcctgtaatcccagcactttgggaggccgaggcaggcggatcacctgaggtcaggggttcaagaccaacctggccaacatgttgaaaccctgtctctaataaaaatacaaaaaaaaatagcttggtgtggtggctggcgcctgtaatcccagctactcaggaggctgaggcagaatcatttgtacctgggaggcagaggttgcagtgagctgagatcatgccattgcactacagcctgggtgacagggcgagactccatctcaaaaaaaaagggaattttaaggaagaatttggttgacagcaaatcacaggaattaggactcctctccctctagaactcaagaaataacaggaaatgtattaaaaagagaagaccaggacagtcagacagtcatcaaacagatgtactctggagaggcactattcatccaaatgccttccggcctcccaacacaggaaccaaagtggggagatcctatttttcttcatcacttggtagccagtacctgggccctttatgtaaccttggcatatcaggtgctgccactcaggtccttcagtcttgaacaagtaacagagatggcaggacatttaaaatagaatcatagcagcatcaccagcatctaactggatgggactctggtagctcctagtgagatagctgactatattattacctatggtcacacggaatgaagtgcccagtgaggacaagacattggagagccacttggcagctgctgtagaacaaaatacagagcatgagaacttcaaacggctggtcagggcagagaaggaaaaccagggatcttctatgactgtcctaaaataatttcttacagccagtgcctaagtaatcaaaagccaaactcagtatttgatcttgcaggttgctggcaatcagttgaattcacagattcaccacattttgtatgtgaaaggaagaaaatttagtaggaaaacagcaggccctgtagtattagaatgtgtatatttgtgaaaatttggaggattctgaatatcagcaactatctggaacatatgtgacagtgggttatgctgatgatcaaaaagcagaggaatcaagtttcagatatgattggatttatcactatgggttcagtcaacagaaattctatattcagtttttggtttgagccactgagagtgactttcattgtttgcctgactgcttgaagaaactgaacttgacagtggaccctctctgaactccagtaacatataatgtaaaagaaaaaaagctaacaactttagaaaataaagctttagtggatttaccacataagacctatccacaaagccacagtgttcctagagaactagaatctggttccttaatccaagctttggtaggtggaaagaatgctttcttactttttattttattttattttttgaggtgaagtctcgctcttgtcacccaggctggagtgcagtggtgccatctcagctaactgcaacctccacctccagggttcaagcgagtctcctgcctcagcctcccgagtagctgggattacaggcacccgccaccacacccagctaattttttggtatttttagttgagacagggtttcaccatgttggccaggctgcaagtgatccacctgcctcggcctcccaaagtgctgggatcacaggcgtgagccaccgcgcccagctgaagaaatgctttctaatgtgcttttcttgtcatctgattgcactggggccagaaagcaatccacttgggttgcagaagcccagcagtggcaccggggctagcacaagccaaatggactttggtaccatgtcaggctagtgtgatcatcagaaaggtctttcccacagagtcttaagcaacaattcatgagcgatgggatccctgcaacaaaaacaaatgcctgttcagctcactaaggggctacttcattagcctaaccaaaacccaagtctggtggatacctgaccagaaccatcatgataataggcaaagcatgaagcacagcattgattttgtaccacttgaaacaagcataagcttggtattgttgaggaaggatcctgcaataataccacaagtaccttcctttcggccttccccgaagggatgggaggctacttaccaaagctgctaggaaatagtgaaacagaaatatgaagactttagaggactgtgggacactggctctgagctaataatcttaactggagaatcagaaagtcacatggtccactggtcaagagggtacttatgggggtttagtgataaatgaggtggagttttaaccaaagtgtgcattggttaagctgaatgaatatctccgggaatgatcagtcaccagagcagttctctgacatgtggggtgaaggttaatgtaaaaagaagggtctaggagaaccccctggaactttcccctcttacagaaacagtaaataataaacaattgttacaacactagaggaaatcacagaaatactgccaccatcccgaatatgagaagtgtaggtatggtcttacctaccagggccccgtttaactctgcaggatggacagtatagaaaataaatgaattttagagaataacagtgaatacatactttacatgttcttccactggcctggtatttcacaattaagaaaataatgaagatatatctaaggtaagttgagaattgaaatagatgtagaagaaagaatagacattatataaacttaatcttacaaatggatagtaatatgagattccaaaagttggtggagcaagaaatggaggtttaaaaacagtttcaaaggtaggtgataaaattctaaaccattaaaaaattggaagggacaagtgaggggttaatgcaagtgagctaaagtctcatctctcaaagtaggaagcaatcatgtataaggtcagtaaattgagatgtagtacgataagcagacagggaggtaactcagaaaaattatttgtttggaattgctgctttagaagtcatccccaaacttcatggtttcaattattttctcttggttcctgtgggtcaggaattcaggaagggcttggccaggtgcttctggctaggagagctctgcacaggtgcagtcccacagctgctggacagctgatgcaactgggcgctggctggatagccctcttcatggagacctggggttgctccaagtggctgctctgcgtaggatgtttgggcttccacacagcatggctgccacggggcagtctgactgctgacatggtgactgatgactgcaacttcaggagcaagtattccagggaccaaaatggaagctgtaccacctttagcaatctagcctctgaagtcacatagtgtctctcctgccatattccatggatcacaatattcacagaagccaacccaattttgaggggaggggacatggattcccccatccctggaaggaatgtcaaggtgacattgtaagaggagcggttgagttggcagatgttgttgtggccacttttggaaaataaaatcatccacaggaatcaaacctaaaaaaagactggaagtcattgcccctggggagtggaatcagggctgaggagggtttgagggtagggaactgtgaagttagatcttagcccactgtactgttatttttttgtccacacacagctattcttttgattaaaaaatcaaatgggccaggcacgtggctcacgcctgtaatcctaacactttgggaggccgaggcgggcagatcacgaggtcaggagttcgagatcagcctggccaacatggtgaaaccccatctctactaaagatacaaaaaaattggccaggtgtggtggcaggcacctgtaatcccagctactcaggaggctgaggcaggagaatagctagaacccaggaggcggaggctgcagtgagctgagatggtgccattgcactctagcctgggtgacagggtgaggctctgtctcaaaaaataaagatgaaataaagtaaaataaaataaaaactaaagtatcaagatcacctctaaaaaaataattgcaggatttaaaaaattgtaagtattatctaagctatgtaaaatgtatgtccaaaataaaactaaaagaagtatggtagaaatctagtaccatctatccagatgtcagaactttatatatactggccttgagcctataatgtccctgccctcaagaaacttacagtccagttaaaaggacagtcaagtgaatcaatgattatagtgcaacactttgagatcaaggacagatgtgcaaagcgcaccgcacagccattgaagaggaacagctaaagactaggggaaaaagtggagggggagagcctcatttgccaccactggtggtgaatatcacacaacttcttagtctgaaagctaggaattatgggagacattgaacatttgctcttcctctttaagaggaatagcagttgatacctagatgatgagggaaagctctctctctctctctttctctccagaagaatgccagctaataaatgtgaagggaacagcagaatttaaaataccctttgccaagcccgatgaaatgattcaggcaaagatcattgatggatgttaaaattattgagtgagatgatatttacatggcctatgagtgtataataaaccactcaaaatcttaacggcttaaaatggccatttattattattcacaagtctgcaattcaggcagaactccatggagagggtttgcctctgctccacatggtgttggctggggtgaggaatccaagatggctccatcacatgtctggtgtctcaagttgggctggctggactgttctctttgatgtgatctctcatcatgcagtagtccagcctgagtttctttccatggcagcttactcccaatcccggaagcttcaatgcctcttaaggcccagaccaagaaataaacaagttagaagaccagtcaagatttacggcatgaaaaataaattctacttcttcatgggaggaccagcatatgcagataggaaagggaggaactgttggtgatgacccacccacattcagaagtgtcctctcagattacttgctcaccgccaaggagaacactggctttacaatggagagctatggctgtcaccaccttgccaaggaaatcaaattgagtatcactaacaatggcaaccagacatcatgtgccacctggtaggatgcaacatgaaaaccacttacaaagtattcttataaaaaaatgtgtagtctgaatctaattgagccatagacctaatgccaggttacagaaaattcactggagagagaaataacaccacaagaaatcaatcagtcagaagagaatgcagggtcttctacaagacaactgacccagtctcttcaaaaaagttaatgtcatttttctaaaaaggttggaagattcttctattcttctagattaaaaaaagttggagatgtataactcaatgcaatatatgaaccttgcttggatcctagtttggaaaaaaaaaaaagctataaaagacaatttgggctggacacagtggctcacgcccgcaatcccagcattttgagtggtcagggcaggtggatcacttgaggctaggagttcaagaccagcctgcccaacatggtgaaatcccatctagaaaaaaaaatggggggcaattgaagaaatatgaatatgggctggattgtaggtaatattatggaattgttattgccttaggtgcgataatggtattgtaggtaatgttagtgtgcattgtacccttcactttagaagacatatgcttaagtgtgctcatacagggatgcagaggaagtgccatgatgtctataaattactttgaaatggttcggggaaaaaaaacccacacatgcacttaaacactacatgaagcaaacatgtctaaataaataacactgaaggataaagaatcgtttctgcagtttaaaaaatatctagtgatagaatctatgactaactgccgggcgtggtggttcaagcctgtaatcccagcactttgggaggctgaggcgggcggatcacttgaggtcaggagtttgagaccatcccagccaacatggtgaaatcccgtctctactaaaagtataaaaattagccgagtgaggtggtgggagcctgtaatcccagctactcgggaggctaaagcatgagaatcacttgaacccgggaggtggaggttgcagtgagcggagatcgtgctactgcactccagccagggcgacacagtgagactccgtctcaaaaaaaaaaaaaagaaaagaaaaaaaaagaatcaatgactaactgatcttcagtgcttcccacacatctttcacgtttttctccttcctctcccaaaatttgccctttgtattatttttgcatataacatgtacatacatattattctttaccctacatctcacatttgctttaggctttggtgtactgttaaatagattcaattttcaaaagattgctcttttactatgcttttcccagtcagctattggctggctgagtcatcctgtagtcttaataatttcctcaagaactgcttatgggaaaaagatttccttggttattagatgttcaaaattatttgtctgaaacttttatgggtgaaatacagattcgctgaacgtgaaaccttgacacaacattccttccttgaggatctgacagatgttgcatcgttctctcatgttgaatgtcactctggagaaacctgaaactagcctgatctctttttaagacaactgacctgatgattttgtctaactgaccaaagtcttcactcttttaaaatccaatacttactagagaatgactcaatgttgattattttcagtcagttttccctggtgtaaaatatcatatctatctacctatctatctatctatttatgtgtatgtgtgtacacacacatataaatgttcaaatgctttagtattttaggaaagtgtatttgaaatttttaaaaatatttctaatgtcttgttttttttcttcaggtattcctattctacatatgtcgactcacatcctttgtctgttttcttatctttttttctgtcttttaaattctttgttttcatttcattttgtttgctttactcattatttcctttctgttccttactgtgtttttcactctattctcctcctgcgttcactttcattttcatatctgtgatgatttttacttttacttctttcctgatttctgccagtgtaacttttatctcctcttgttgtttcatcattcttccctgagtccttgcatttgtagtcttccttcataaaataactgcttcaccaaatgttttaaatcatggtgaaatatttaagtatccaaataaaagattttttgttttgttttgttttttccctgagtgtaaatctattgaggagtctttctgctcttcaccgctctttcccctctttttttttttttctctcataatacctctgtatcaggattgtgccagttcctttcaaaagaaattacttacctttcaagtcgagcacggtggctcacacctgtaatcccagcactttagaaggccaaggcaggcagatcacctgaggtcaggagttcgagaccagcctggccaacatggtgcaacctcatctctactaaaaacacaaaaattacccaggcatggtggcaggtgcctgtaatcccagctattcaggaggctgaggcaggagaatcacttgaacccaggaggcagaggttgcagcgagccaagattgtgccattgcactccagactgggtgacaagagcaaaactctgtctcaaaaaaaaagaagaagaagaaaaaaaagaaactatgtatctttcaggccgggcacaatggctcacgcctgtaatcctagcactttgggaaactgaggcaggcagatccgctgaggtcaggagttcaagaccagcctggccaacatatgaaacccatctctactaaaaatacaaaaattagccaggcatgggggcacatgcttgtaatcccagctactcgggaggctgaggcaggagagtcgcttgaacccaggaggcggaggttacagtgagctgagatcatgccacaccctagcctgggtgacagatagagactccatctcaaaaaaaagtgtttttaatttaattttctatattttgttcatttttaagaatgtaagaagagtaagaatgccaatattgctattctaaggtaatccaaaatatctttttaatggtttcaacaagatacaaaaaatatttaaaaaaaattatcagataagattagaaattagcttaatggttcttattgtttatttcctgctttcaactttttcatgtcaaccaaaagagtcaaattctaaaacatttgaagagatttatactgagccaaatatgagtgaacaatggcccatgacacagccccgggagatcctgagaacatatgcccatggtggttgggctgcagcttggtttatacatcttagggagacatgagacatcaatcaatacgtgtaagatgtacattggtttggtccagaaaggtggaacaactggaaactgggaggtcataggcagattccaagattttctgataggcaattggttgaaagagttattatctaaagacctggaatgaacagaaggaaggaaggaaggaaggggggaaggaggaaggaaggaaggaaggaaggaaggaaggaaggaaggaaggaaggaaggaaggaaggaaggaagggagttatttagatttctgctttgtcataacccatgcatttatttaactccaagtttcctgaggaccaaatcatcagtcaatttaacaataaattattggacacctacttaggtgtccagaattcagcaaggcactgtggaagaatcttctgagtcaaagagttataagtcatgtgattactttataatacaatgtgataaatgttataattaaaatgtggaaaatgtggattagagaaaaaatactcttcttaggttgcttgggaaaacctcactgagccactgacacatttgaaatcaatcttgataaataaaccagctcacaaggcagaaggtagagtgaggaacttttagaaaaaaagacattgctgatgaactgcatcaggttgaccaatacaggaaaatttgggtataatgccatagagaccaaaaaaattctttctgtaagacacagtatcaccaggatgataaaaatatcaagaagaacctgcattgtcagctgggttctgaggggctgagagccagtcacccaatatagtgcttctgagtttgtattttgcagggttttcatggatggcgagtaggttgtggccagaatttaggttatatgcattctgtgtttttggtatgtgtgaatctgaataggcaagaagaacttgtattagtttcgtaatactgttgtaacaaattaccacaaagttagtggcttaaaccaatgcagatgcattatcttacagttctgtcagtaagaagtccagtacaggtctcactgggctaaaatcaggacgtcagccagagatagtgttgcaagcctgtagtcccagctactcaggaaactgaggtgggaggattgcttgagaccaggagtttgaggctgcagtgagctgtaatcacaccactgcattccagcctgggttatgattgcatcactgtactccagcctagggagaattagtttccttggtcattcaggttgtgagcagaattcaattccttgtggttgtaggactgaggtcccatgttcttgctggctgtcagctgagaggtgttcccactttctcgaggccacctacactccttggcttgtggccccctcctccactttcaaagcagcaatggtgggttgagtcctagttgtgcttaagatctctcctgcctcttcttgcattgctgcatctcacccacccactctcctgctgtcctctttcactttaattttctctgtttttattaaacttgttactttaagataattgtagatgcacatgtagttgtaaggaacaaaacagagatcccctgtacccactttcccccagtggtaacatcctgcaaaattataccactatatcacaaccaggatattgacatagatatagtcaagatacagaacattcttattatcacatgctcccatttttatagccacatctacttccctcctgttccacttcctccttaacccctagaaatgatgttagtttttgattttttgttttgttttgtttgagatggagtttcacttttgttgcccaggctggagtgcaatggcacaatcttggctcactacaacctctgcctcctgggttcaagcaagtctcctgcctcagcctcccaagtagctgggatcacaggcatgcaccaccactcccagctaattttgtatttttagtagagacagggtttcaccatggtcaggctggtctcgaactcctgacctcaggtgatccatccacctcggcctcccaaagtgctggaattacaggtgtgagccaccgtgcccggccaatgatgttagttttttaaaaaaaaaatttaaattttttgagataatcttgctctgtcacccaggctggagtgcagtggtgcaatctcagctcactgtaacttctacctcccattcccctgcccacccccaagcaattatcccacctccagccttccaagtagctaggactacaaatgcaggacaccatgcctggctaagtttttgtacctttggtagaagcagggtttcaccacgttgcccaggttggtcttgaactcctgagctcaagtgatctgttcgcctcagcctcccaaagtgttgggattacaggtgtgagccaccactccagcctgttatttatttatgatattgccatttcaagaatgttagataaatggaatcacatagcatgtactgtgggattgactttttgtcaactttttgggattgacttttttcccttagcataattcatcctggttgctgtgtgtatcaataatccttttttttttttttttttttttttgagacagggttttgctctgttgcccaggctggagtgcggtggcacaatcttggctccctgcagcctccacctcctgggttcaagctattctcatgcctcagcctcctgagtagctgggactacaggcacatgccaccacgtccagctaatttttgtatttttgtagagacggtgttttgccatgttgcccaggttggtctcaaactcctggactcaagttatctgcctgacttggtcccccaaagtgctgggattacaggcatgagccactgtactctgccatccattcttttttattgtcaagtagcatggtactgttgagtattgttgagttccacggtacatatgtaccacagtttgtttaaccattcacttgttgaaggacatctgaattgcttccagttttttactattttggatgaagttgctataaacatttatatacatgtttttgtgtgaacataagtcttcatttctctgggataaatgcccaggaatgtgattgctgggtcacatagtagttgcaggctcagtttttgcttttctttttttcaacaaactgccagactgttttccagaaaggctgtgccattttttacattcccatcagcaatgtatgagtaatctagtttctccacatcctcaccaacatttggtgttgtcactattttttgttttagccatttttatcaacatatactgatatatcattgtggttttattttatatatattttttgagataaggtctcactctgtcacccaggatgaagtgcagtggcgtgatctcagctcactgcaacctctgcctcctgggttcaagtgattcttctgcctcacccttctgagttgctgggattacaagggcatgccaccatgcccggctaatttttgtatttttagtagagacgggttttcaccatgttggccaggctggtctcaaactcttgatttcaggtgattcacgtgccttggcctccaaaagtgctgggattacaagcgtgaggcactgcacccagaccattgtggttttaatttgtatttctctaatggcagatgatgttggacatatttcttcatgtgtttatttcctatctgtgtgtcttcctcatggaaatatctcatgtaaatttcccatgttataattggttttattattattattattgagatggagtttcactcttgttgcccaggctggagtgcaatggtgtgattctcagctcactgcaacctctacctcccagattctcctgcctcagcctcctgaggagctggcattacaggcacccaccaccatgcccggctagttttttgtgtatctctagtagagatggggtttcaccatgttggccaggctggtctcgaactcctgacttcatgtggtccaccgcctctgcctctcaaagtgctgggattacaggcatgagcctttgcacctgaaggtttcaatttttttattgttgagttttgagaattatttgcatatcctggatactagtcctttgtcagatatgtggtttgcaaatattttctcccaatctgcaggttacctttttttccttttgtcagggtattttgcagagtcaaaatgttaaattttgatgaagcccaatttatcaatttttcttttagggactgtgcttttggtgccaaatctaggaagtctttatctaatcctagctctcaaagtgtgtttttcctaacattttatagttttagatttaagtccatgatcctctctgtattatttagggtactcctgagaaatagaatgaataggatgtatacataagcaaagagatttattataagaaattggcttatgcaattatagaggctggaaaatcccaagatttgcagggcgagttggcaagctagagacccaggagagctaatgtttcagttcaagccaaaggcagaggaaaaagccaatgtcctagtctaaagatcatcagacaggaagaattctctcttatgaaaggaaggatcttcctttttgttctattcaggccttcaactgactggatgaggtccacccacagtaggaggtacaatctgctttactcagtcttctaggttaaatgataaatctcatccaaaataccctcacagaaacacccagaataatgtttgactgaatatcagggcaccacatggctcaatgaagttgacacacaaaattagccatcaccctttcttaagttttgcagatggtataaacttttggttgaggtattttttttctatttgtttgtttttctttgtctatggacgtccagttgtggcagtcccatttctttttttcttttcttttctttttttttttttgagacagagtttccctctttttgcccaggctggagtgcgatggtgtgatgttggctcactgaaacctccacctcctgggatcaagtgtttctcatgccttggcttcccgagtagctgggattacaggctctcacaaccatgcccagctaatttttttatttttagtagatatggggtttcaccatgttggccaggctggtctcgaactcctgacctcaggtgatctacccacctcggcctcccaaagagctgggattacaggcatgaaccaccatgcctagcctggcagtcccatttcttgaaaagggtatctttcctccattaaattgcttttgcacttttgtcaaaaatcagttaggtgtatttttgtgggtttatttttggggcctgttgatctatgtgtctgcctttccgccagtaccacacagttttcattgctgtagctatataatcagtcgtgaaagcaggtagattgattacttccactttattctgcttttaaaaaatgttttcactattttaatttctttgcctttacatataaattttatagtaatcttgtctatgtttacaaaaatattgctatagtttgaataggcagtgcattaaaataatatatcagtttggaaaaaaattgacatctttattatacagagtcttctaattcatgaacatagtatgtcagtttatttagatctttgatttctttcatcagcattgcacagttttcaacatgcaagtcctgtacatgttttgttagattacacctatttcatttctttcagaaattataaatgaaatcatatttttaattgtagtgtccacaagttcatggctagtatataaaaatgcattttatttttgtatattcttttatttttgtattatgcaaattttctggagatgcttaaattctactaggtgtttttcttttttcaagattcttagggattttctgcataatcaatcatgccatctgcaagtaggagtcgttttacttattactttctgatctgtatgatgtttacttccttttctagccttattatttcttgccttattgatctagaacttctaggactgttgaatgagaatgatgagagcaagtttcttagctttgtccttgatcttatggaggaagcattcagtatttcaccattagctgtaggtttttctacagatgttcttcataaagttgaggaagttcctctatattcttatatttctgagaattttaattatgaatgggtgtcaaattttgtcaaatgccttttctacattgattgatgtatgatcatgtgattttccttctttcacctgttaatatgatagattatactgattgaatttgaaatattgaaacagtcttgcatccttgaaataaatcccaggtagtcatagggtttacttatcttacttgaagtaaatttaccaatggaatttagatatcatggggtctcattcatagagaattggctcactggaggccaaaataaatgcaaaggaacaacaacgtcagaaagctgaacatggaatctcttgattgttattatctgtaatcactaaattatagggatagtgttggggcagaacctgatgctgggccaagctggaattctagccattgagccatagctgctagttcagggccacctccaaagggaaaagttatgctaaaacaacagagagcagacttattccaagagactaaggaaagagaaaagggagagagaatggatagaaatttaaaaatagttattaagagatatcataaataaagtgggcattggtggtgttgaaacaaaagtcttaatgcagcactctcagaagttggatggacaaatggaaacccttactagtcccccaacattgaagggcgctaaacaaatccactttattcaacctagtttggataaattttaaaagctgcaaagcaaagatgactgtaagaaacctgacttccaatcacctggggtgaagatatgcaaagtagtcaaggtaagaactgaagaaaggccgggcaggtagcttatgcctgtaatcccagcactttgggaggccgaggtgggtggatcacctgaggtcaggagtttgagaccagcctggccaacatggtgaaaccccatctctactgaaatacaaaaattagccaggcatggtggtgcatgcttataatcccagcttctcaggaggctgaggcaggagaattgcctgaacccaggaggcagaggttgcagtgagccgagatcatgccactgcactccagcctgggcaacagagcgagactctgtcacacacacacacacaaacaaaacaaaacaaacaaaaactgaagaaagaacctaggcccattggcctaatctctggctggggtccaagaccaaatgtacgtgaatgggtaaattgtcaggggtggaaaagaaacatttctaaaattctttgacatgggagccccatgcactgtttttctgttagtgaaattctaaccaaggcaacagattggaaagatatgaaaatacatttgatgggattaaaatgaaagtttggatagaaactggaatgtctgaagagactctatttggagtggttgcatcccctttacatgaatgtactatggggatggatattgcctgaggaaaatttcctttacctagtaatgtaaaacacaagacaggtggccctgcccttcagacaatattgattggacatgctaaatgggaaccagtaagattgctgagcccacacaagttgttaatattaaaaactataggatacttggtggacaaaacatgttaaaaagacagtctggtacctaaagggtgaaggccacttctgtttttggaaactgatagcatcagatgggaactttcaagcctgagtggcatttctctgggagacattttggtcatacaatatgatgatgaactggaccagttgttgatggcagagtggaagtcttatatctatctgccactatcttttgactctaatttttcaaattatgtttactaccatatcataatacagtgtaactctgggattgtaagtgaggttttaatgttcacactgatggccaatgtattgagaaattgagttaaaagcctcctactctacactggctcctccaaatgtcagatatatgttcattttactgtaagagagctttggccaaaggccaggtggcagccgtgttgtaaaggattcagtcttgcccaaagagaaggtttgacttttgcccttggcttatgggaggttatctacgtcatacctgataggagtacctctgtttagatggggactgggcaaactggattttagggtggagactggccattccagagagaccaagtatgtgaattagggggcttttgtcatgcactatcagtctagttggagtctcagtccaaccaagtggacaattgatcaagcctatgtgctggagtcccagtaaaaactctggacacagaagctcagacaagtgtccctggttgacaatactccaagcatactgtcacataccaatgctgggaaggtaacacagcctgactccgtgggagatgacaacaggagctttgcatttggagccctccagactctgccttaggcatttctttccttagctgactttgatctgtattctttccccataataaaccataactatgagcataatggctttcagtgagttctgtgagtccttccagtgaatgatcaaacctgagggtggttcaggaacctctaaacttgcattgatatcagaagtcttggacattatgccttcaaattttgcagtttggctaactgctgtaagtcaagaaaaaaaggaaaagaaaaacttttttttctccttcgctccctagtatttctagaaacaacaacaaaaatgaaaagcaagtaagcaaacaaaaatatgtgcctctatgcaaattaaaatcacaatgagacttcacaccaactaaaaaagctataatcagaaagacggatgataacaactgttagtgaagatgtagagaaattggaacccacatacactgctggtgggaacacaaaatgttgtactcactttggaaaacttctggcaattcctcaaatagttaaacatagagttgccgtaagatgtagcaactcccctactaggcatgtacccaagagaaatgaaacataatgcccacacaaaaaccggtaaatgaatatttacagttagcataattctaatagtcaaaaagtggaaacaacctaaatattcctcaattgatgaatggaaaattaaaatgtcgtatagtcatacaatgggatattatttggcaataaaaataaatgaagtattaacatgtagtacttcatatcatggatgaaccttgaaaacattacagtaagtgaaagataggatgaaaaaggctacatattatatgattccatttatgtgaaatatcccgaataggcaagattatagagacagaaacatgagggattgcttaggcttgggcggggcttgggaggaaatgggtcgtgactgccaatgagtataggattttggggggttgtgacaaaaatgttctaaaatttatggtagtgatgggtctacaactgtgactatattaaagacaatttattataagctttatttatttatttatttttgagacggagtcttgatctgtcacccaggctggagtgcagtggcgcgatctcaccgcaatctctgcctcccgggttcaagcgattctcctgcctcagcctccagggtagctgggattacaagcatacgccaccatgcccgggtgattttttgtatttttagtagagacgggggtttcaccatcatggccaggctggtctcgaactccagacctgaagagatccgcccgcctcagcctcccaaaggtcggggattacaggcgcgagctacctcgcccggcctattacgcacgttaaatcgggaattgtatggtatagtacgtgaatgagaccttaataaagctgagttgtttgcgttatttatttgttttgaacctgcttggtaaagatgaactctgaactcaatgaaattgaattaccttagtgattcctcaaaactccctgttaaggctttccggtcctctgaaaagcgaaagtgggccgtgaccatcttctaaaaacgccaaaaaatatggaatggagcccgggatttcagagcgtagtcgctgggctcccaggctgagcccgctccgggagcctccagccgccctttccgatgctccggggcctccgagcaacccagcgggcagtcccaagccgagggctgaactccagggaggagcgctcgtcacgcccacactggaggccgtggcaggcctggaaacccgccctgcggggtcctaagaagccattcgagctcccgaagagcgagtcttcgcagcccttcccggcgcgctcgcatctggcgctgtccggagcccgctcgcgacgcacagggacgggaggcccggtttccacgggagaggctgcggactgcgggccccgtcccgaggccgggggagtgggagacacccggcgacccccgagaggcgattctggcagtggtggcggtggcggtggcggtggcggcctactcgccccctggaagcaccgccccgcctgggtggcgcgcgcgccggctcctcctcttcccctccgccgcggcccgccccggcccgcaaacccaaacactccaggcgcccgcccgccgcgcgtgattctcgcctcgccgcagcccagccctgcgcgccttgcccggcggcccccgcccggccgctccgggcccctggccccgcggagcgatgctgctgctggctgccgccttcctcgtggccttcgtgctgctgctgtacatggtgtctccgctcatcagccccaagcccctcgccctgcccggggcgcatgtggtggtgagtggcctcctgttgctgccccccgacttaccggcccgcgcggcctttccgccgccgaggccgcgtagcctacgtccctttttccaggccgcggtccccaggaaggcatggccaaatggggaaggtcacctgccgccgtccaccccggcgcttttcccccggccccggcacccggcctcgcggacccgccctccgcagcctcgggctcctcctagggccggagagcgtgcgacgggggaccccgccggccgcagggttcccggggccccaggggttctgtggctgctcgtgaatccatgcaacatccctgggatgtggatgttttgtcctcagtttttccgatgagtcaactgaggcacagagaggctgagaaactttgccaaggacacagcggtcggtggtgtgcagggtgcggcgcgcggccccgggcgggggcagacagcggggaagtggggtcccagccgccgggacccgccgaggcagctcggaactggaagatggcctgtgcgagtgacgggaagagccgctgccagaggattccaggaagtgactcacctggggaaactgctcagaacccagcgggctggcggtggtggcttagcggtattgggacgcctgtcccgtctacactgcttgtctctgagctcagcgtggcatctgctgattgctgctccaatgcaatcctttgctgttttctagtgggaaggatgagctaaacgacaaggcttgtgtgcgaggaatgaaggagaggtggataggtgtgatttatttcttggcggaagctcgcatattcagcgatccctgttctgcaaatgtggcacctttcttaaacagagagaatgcctccttgcctgcgcccagcactttcccgtttgcagtggctttctcacgagcattctcgtttggatctcccaaacccgaggcacagtgaggcgaggagttaggagtaaggagggttggttacaaaattggccgcacacctcttcctgtcctatctctgcaccggagatccgagcctccccgctgagctggtataaaataagatggtcgtttttcttagtatgctttaaatctgtacaagggtttgtgaatgagaaaatgtatctgtttaatttctcctttgtaaagctattagctttttccaacacctcctgttcctaatggggaaagagtgtggattcattacaaaaaataaataagagaaaggcaaaacttgacactctaaattctgaaagttttacatccgcaagagaactgctgcctcaaaagcgtggctttaaaccttggatcctttcagagcttgagtttatagagcataactttgcaaaaactaaagctaaacgcagaatgaaaattggaattccttatttgtaagacagtttcactgagccttgactccagtccttccagccccatcccgcggcaggtcataggtgagataataaatgctgtgtctgttcaggtggaccaagaagaatttatttttaccatcccgctttaatacgcaggattattatttcacactctaagtaatgtgagaatgacatgaatagttcacatggtgtcaccatctgtcttcttttttaatgtcataagaagagtgaaaagtgtaattgttcttgagatttgttaggagttgactgtggtattgttgggagagggagctgatggttaaactgtctgcccatacataattaagaacaaacttataacaattgtttcatttttaaaacaattttatatactagtgttttctatctagttacggtagtaaaattgcaggaaaaaagcagaaaatcacccacctcagcctccgaaagtgctgggattacaggcgcgagccatcgcgcccggccaacaacagctatatttttacagtaatctgctgataactggctgattaccgaccaaataaatctcttcagtggtggcaggttgaagctaaaaagaagtaagggatgcctatgagtcccatagaggtaggtgcatttgcgtaggagacacttcccaatgatgttaaaatcctaacatggagtcagagatcttcctcccagcatgatttatgtataacagtgaatattaggaaaaatctaaatgtctggttatagggaaacgttgaagttttgatgcagctatttgatgaagtattgtgaaaccttttcgttttttgacaaataagacattacaatataattttttaaaaacaggagacaatactatgcaatattatgtaatttgcatagggacagtgactagaacgatatggccgggtacagtggctcactcctataatcccagcactttgggaggtcaaggagagtgcataacttgaggtcaggagttcgagaccagcctggccaacatggtgaaaccccatctctactaaaaatacaaaaattagttgggcgtgctggcgcacgcctgtaatccccactacttgggtgtctgagacaagagaatcgcttgaacctgggaggcggaggttgcagtgagctgagatcgtgccactgcactccagcctgggtgactgagcaagactgtctcaaaaaaaaaaaaagaaaaataatgttgcattgttcacttattcagtgaaatatataatatatattgagccctccccaggctaagtgctaggaatatagtggagaacagaaaaataattggtatttttaatggagtttatgggtaggtgataggagaggtggttgtgaatcagataatcacacaaataaatctagagctgtttattatgtgcatgtcataaagaagaaatacagtgctgaaaagtgtgtcagtgtgggggcaggggagacagtgaaggctttcctgaggaagtggtatttgagctgagatttgatgggcgagtaggtgtcagatgaagtggggagaagagcattcgttgcaagggaagtaggatgtgccaaggtactgtggttggagggtttttacagtaatcttctgctgataactggctgattacccaccaaataaatctcttcagtggtggcaggttgaagctaaaaagaagtaagggatgcctatgagtcccatagagataggtgcatttgcgtaggagacacttcccaatgatgttaaaatcctaacatggagtcagagatcttcctcccagcatgatttatgtataacagtgaatattaggaataattccataattgaaagccagtatagctgaactgtagataggggtagaatagtgcaagaagagctttacttttcaggatttccttgtgattgtatattacttttatactaagcagtcatttcaaataaatattcaggtggccattcttttcatctgttgtagagctaatcttgcataaatgtgcattaagaaaataagattcaaccaacccaaatgtccaacaatgatagactggattaagaaaatgtggcacatatacaccatggaatactatgcagccataaaaaatgatgagttcatatcctttgtagggacatggatgaaattggaaaccatcattctcagtaaactatcgcaagaacaaaaaaccaaacaccgcatattctcactcataggtgggaattgaacaatgagatcacatggacacaggaaggggaatatcacactctggggactgtggtggggtcgggggaggggggagggatagcattgggagatatacctaatgctagatgacacattagtgggtgcagtgcaccagcatggcacatgtatacatatgtaactaacctgcacaatgtgcacatgtaccctaaaacttagagtataataaaaaaaaaaaaaagaaaaaaaaaaagaaaataagattcatttggatttggaatcagaggcagactaatgtattatttatgagctagacttatagggcacttttccaccagtgaactcagaaaaatattataggtgtgcaatttatggttccataagaaaacagtcaaagcagcaggccttgctgatagtatctttcatgcttacacttactccagtcattaagtttgggatgaagaagttaacaacagctaatcatttagttcttgtagattcattttaagagcctgtcatagttgttttttataaaaacttcctacagaggggagatttcaagtgctaagaatattttatgattttgttttaggttacaggaggttccagtggcatcgggaagtgcattgctatcgagtgctataaacaaggagcttttataactctggttgcacgaaatgaggtaaggcttctaggttcattattactgacttgcttcttcgacttgaaattagtcaaagaggctgtgctaaacatcttagcattcacacctagaaagcgcttcttccttgatgtgagatgtgtttcctgaactactgattctctctagtatttaggccaaacacttctctgttgaaatcaggtcggccccacaagtatttatttagtaccattggcatattaggcaacatcatcatagatactgcagatcctgagatgggagaggccaaggtctagttgaaggagcacacctggccattggaagccagggagggcccttggccaggtcagaagtgctggaagcagtgattctggagctgatacctgaaggtgtgtaggtgtttctctataatttttcactacgatttgcttaggacatgatatatatctctagtgaaatctatacaccatagaggaacctcgtccctccttagaagtttagcaaaatgtgtttttctgtattaagtcaacacagaatctgtttttattttttgtcagggtttgtttttgtcttgccaaagttgtttttagagcacaaagcagtgacactgtgcacgtgaactgtcatgacgtcctcttgctccccatatggggactggaggaaagtgaccacacagctggctcgtccgctgcagcaattctagtgcttgacacgtagtacatgctcagacatgtttgttgaatgaagaaatgaagggaggaatgatggagtgcctgggaatgtcagcatggcatacttccatggggatcttggattcacccatgtgcaaggagggtgatagtatggtaactcctcaaatgggtggagggctggacaggacccattaggaatggtaggccaggaagggccttgggggaaaatttaaataatgtcgcagacttagtcttggacctctataatttcttttatttttttcttttttcttgagacagcatctcactctgttgcccaggctggagtgcagtggcatgatctcggctcactgcaacctctgcctcctgggttcaagtgattctcctgccttagcttcctgagtagctgggactacaggcgcccaccaccacgcctggctaatttttgtatttttagtagagacagggtttcaccatgttggtcaggctggtctggaactcctgaccttgtgatccgcccgccttggcctcccaaagtgctgggattacaggtgtgagccaccacacctggcctggacgtctataacttcttttgcaaaccaagaaagacaaaattagctaccttttatttatagcttgacttttctaacaatgaatttgctttggcattgaagccaccttacataaatgaaaacacaaatttgatgaaatggcattttgtgagttttaaacaccagttttgatgcaagtaaataaaagtggaggcagagaaggccagcatttcaggcccccaggagctcatatggggcccttgcattgctagaaatgaatgaactgaatgaagaacctgtggtgttgagtaattcattcttttttttttttttttttttttttttttgagacggagttttgctctgtaacccaggctggtgtgcagtggcgctgtcttggctcactgcaacctccacctccggaatacctgggattacaggtgtgtgtaaccacacctggctgatttgtgtgtgtgtgtgtgtgtatatatatttacatatatataaaatatatatttttattatatatattatatattttatatatatatatattttttttttagtagagacagggttttactatgttggccaggctggtctcaaactcctgaccttaagtgatccacccacctcggcctcccaaagtgctgggcttacaggcgtgagccactgcgcccggcctcactgtgtcacccaggctggagtgcagtgacacaatctcggctcactgcaacctccgcctcccaggctcaaccaatcctctcacttcagcctcttgagtatctgggaccacaggtgctcgccaccatgcttggctaagtttttgtatttttggtagagacggggcttcaccatgttgcccaggctggtctcaaactcctgagcttgggtgatccactcaccttggcctcccaaagtgctgggattacaggggtgagccaccatgcctggctgagaaattctttcttttctaatgtaatttttaattccagtctttgcaaagtcaagctgtatgtatctttagtcataggacaatattatttcattatagacatattcaggtttagaaactctgcatgccttttggaagaattcgcctctcctttggttcctctctattgcatgatattatttaagttactttttacagcaaattaagataatctgatatctgttttcttgagactaagtaaaacaaacaaaattaggaccttggaagaattacataattacacaggtaaccttgcttaagagtattttatagtagccaggcctagtttacccagtctatccagaaagtgattcttactatgtttgggtttatagtagaagaagaaaatattggacaaaaagcagtattgacagggagtcacacataccctcaactttggggagcagtacatattaatagagttgttcttgtcttatatcacaactaaataataagacatttattagaactgtagagtcagcctcagcaattagtactgttaactgggattttgaggtttatctgttttctactatctttctctaattaattttcaaacttttatcacttattcatagcttaacatacttcacaacttctttctttcataggctgtggcccagtctgtctatgcaatgtagatactgttttgtgtgttttctggaatttaatacatacatatagaaataattgctttttttctctcctttgcaataaacggacatgcatatagacggtcatcacgactaattattctgtattgctttcaggataagctgctgcaggcaaagaaagaaattgaaatgcactctattaatgacaaacaggtaaatctctgtcttcagaatgcattttctgtataactcagcacagctgtataaaggaaaaacagagttacttcacctgtgaatagttaattgaaagcatatatgtactgttttttaaaaggtggaattgtttgaatggtctagtaactcagaatatcacacacacgcaaaatgaatagactcccacacacattcatatctacaaatggtcaaataacagaatgttttactggcaaataatttcattttaattttttttttaatgaactttatacaaatgcttaagaggaaaggaatatttaaaatttatttggttatggaatttttgatgaataaaatgctatttatatttcagtataaaacataatagcaaattaataatcacacacccatcacccagcctaagaagtagaaatgatcagggtctctgaagcccccacagcagccttgtccctcttttcttgttcctagaggggcaaatgccaacccgatttttggtgttaatcctttctttttcttttcttttttctttcctttttttttttttttttttttttgaggcagtgtctcaatctgtcatccaggctggagtgcaggggtgcgatctcagctcactgcagcctcgacctcctgggctcaagcagtcctcccacctcagcctccctagtagctgagattatagacacgtgccatcatgcatggctaatttttgtatttttggtagagatggggtttcgccatgttgcccaggctggtcttcaactcctgggctcaagcagtccgcctacctctgcctcccaaagtgctggtattataggagtgagccactgtgccctgcctctttttctttttaattttaccatatatgcacataactctaaataataatatattgtttagttcttttttttttttttttttgagacagagtctctctctgtcacccaggctggagtgcagtggtgccatcttggctcactgcaacctccacctctcgggttcaagcgattctcctgcctcagcctcctgagtagctgggattacaggtgtgtgccaccacacccggctaattttttttgtatttttagtagagacagggttttaccatgtttgtcaggctagtctcaaactcctgacctcaggtgatctgcctgccttggcctcccaaagtcctgtgattatgggcgtgagccaccatgcctggccaatatacttagttctacttcttttattatatcattcttattttttaacagctttatgagatataatttatataccatacagttgacccatttaaaatatataattcaatgatttttaatgtattcatagagttgtgcaactgtcatcaaaatcaattttagaatgttttcctcaccccgtgaagaatctccatgtgtattagcagtcacttgccatttcctcccagcctcttctcagctaggcagtcactcatctactttctttctctatagatttgtataacttccttctttatgcttcttatgcaacttgatttcttcactcaatattattattatttatttcttatttatttatttatttttgagatggagtctcgctctgttgcccagtctggagtgcagtggcacaatctcagctcactgcaacctctgcctcctgggttcaagcctcagcttcctgggtagttgggattacaggcgcgcgtcactacgcccagctaatttttgtatttttagtagagacagggtttcaccatgttgatcaggctggtctcgaactcccaacctcgtgatccgcccgcctcagcctctgaaagtgctgggattacaggtgtgagccaccattcccagaccactcaatattattctttaggccaggtgcggtggctcatgcctgtaatcccaacattttgagaggccgagacgggcaaatcagttgaaggtaggtgtttgagatcagcctggacaaagtggtgaaaccctgtctctactaaaaatataaaaagttagctgcacctgtaaccccagctactcaggagggaggctgaggcaggagaatcacttggatctgggaggcaaagcttgaggtgagcagagattgcaccgctgtactccagcctgggtaacagagggagactccatctcaaaaaaaaatatatatatatatatatatatatgtatgtatgtatgtatgtatatatatgtgtatatatatatataattttaaaaattcatttatgttgctgcaaaaagttggagtaaattttttttttttttactgctgcgtagtattctattgtatgtatagactacattttgttcatcagttcagcaattggtggatatttagtttgttcccagtatttttgttagtttgttttgttttttactattagaaaagctttcagtattctctttgtgcacgtgtgcaagaatggtacatacccagaaatggaattgcagagctgtagtgtatgcagttcttcaacctcaccaaagtggttaagctcccataagtaggaatgcggtttctgttgcgccacatccctgccaatacttggtattgacagactttttactttttgcctttctgatgagttttgaatagtatttcactgtggtattcattgactttttcccttctagaatgttagagatctttccatgtgcattaagtaaatttgccttaaattgctgcagcctaggattgaagtacaccagagcttattccgtcaggtccctgctattgagctgtttccattctttttattttattttgtatttttatttttgcaattgcagtctgtgctgcaagtaaaaatccttgtgtatatcttctgcacatgtgagtttttctctargactgtggtctttacccccttctctgaagcccacaagcattggaaaaacaccagctctgtaaattgccccgttttttcccgtattcctgtaatatctgatagacgaaggagtatggtgtgaagtcatggagtcagtgttcagggccaaggccagtcttgcctgctgccaacactgtctccgctctgggcttcctcatcatgacaccttctacctcttcatctaccaaaggactttaggtcaggtggaaaacttacctttcacatcaaggaagggagatagggctggggcaggcgagaatgagcttgatccttctgccctgccaggcttctagggaccttttgtgtgtgtgtgtgacttgttaacatttttttgttctgagatttcacttgtctgtggcatagattttattattagtaactgatctaatactgcatgaaaaggcttgttttaaaattaatcatatgattactactgcctttttttttttttgagacggagtctcactctgttgcccacgctggtgtgcaatggcatgatctcagctgactgcagcctctatctcccagggtcaagcaattctcctgcctcagtctcctgagtagctgggattataagtgcccaccaccacgccaggctaattttttgtatttttagtagagacagggtttcaccatgtaggccaggctggtctcaaactcctgacctcaaatgatctacctgcctcggcctcccaaagtgctgggattataggcgtgagccaccgcgcctggccgattactactacctttaaaacaatgttttctatctgaggatgttgggataaaatccactctaggtatacattacaaccaagggcaacccctctagactagaatgctgcaggttatatttgcaaagagggctgtttccttttcttaggaattttgatcatttggacaggattccttcttgaaaggaatcagcactgaggcccttatatggaatatttccatcactccctagggttggcctgtgccctttcacagttccttccatcctccatgcctggctgtgggcaacccctgatctgccttctgtcactatagattagtggcatttcaagaggagcatttatatatttttaaaaagattcctcagagttttaactccaaaagctgccaagaaaattagattctgctaattgcatcatcagcaaacactgaaatctgttcattcaatattggcttccttctgtattcaatgaactgtcttttctttaaaaaatatctttaagaaatagtttggtacctgcaaaactttgatcactttttttcttttttaacaggtggtgctttgcatatcagttgatgtatctcaagactataaccaagtagagaatgtcataaaacaagtaagaggttgggctaattggaattc

SEQ ID NO: 31 - DNA, 218821 bp, Homo sapiens
  modified_base (106949)..(106949): a, c, g, t, unknown or other
  modified_base (110322)..(110324): a, c, g, t, unknown or other
  modified_base (115133)..(115133): a, c, g, t, unknown or other
  modified_base (131300)..(131300): a, c, g, t, unknown or other
  modified_base (139059)..(139158): a, c, g, t, unknown or other
  modified_base (157740)..(157740): a, c, g, t, unknown or other
  modified_base (157777)..(157777): a, c, g, t, unknown or other
  modified_base (157900)..(157900): a, c, g, t, unknown or other
  modified_base (157919)..(157919): a, c, g, t, unknown or other
  modified_base (157926)..(157926): a, c, g, t, unknown or other
  modified_base (158094)..(158094): a, c, g, t, unknown or other
  modified_base (158138)..(158138): a, c, g, t, unknown or other
  modified_base (158193)..(158195): a, c, g, t, unknown or other
  modified_base (158241)..(158242): a, c, g, t, unknown or other
  modified_base (158259)..(158259): a, c, g, t, unknown or other
  modified_base (158278)..(158278): a, c, g, t, unknown or other
  modified_base (158295)..(158295): a, c, g, t, unknown or other
  modified_base (158740)..(158839): a, c, g, t, unknown or other
  modified_base (158929)..(158929): a, c, g, t, unknown or other
  modified_base (163528)..(163530): a, c, g, t, unknown or other
  modified_base (163550)..(163550): a, c, g, t, unknown or other
  modified_base (163765)..(163765): a, c, g, t, unknown or other
  modified_base (164000)..(164000): a, c, g, t, unknown or other
  modified_base (164047)..(164047): a, c, g, t, unknown or other
  modified_base (164084)..(164084): a, c, g, t, unknown or other
  modified_base (167233)..(167233): a, c, g, t, unknown or other
  modified_base (167236)..(167236): a, c, g, t, unknown or other
  modified_base (167238)..(167238): a, c, g, t, unknown or other
  modified_base (170247)..(170247): a, c, g, t, unknown or other
  modified_base (170249)..(170250): a, c, g, t, unknown or other
  modified_base (170252)..(170253): a, c, g, t, unknown or other
  modified_base (170259)..(170259): a, c, g, t, unknown or other
  modified_base (170262)..(170263): a, c, g, t, unknown or other
  modified_base (170266)..(170266): a, c, g, t, unknown or other
  modified_base (174470)..(174470): a, c, g, t, unknown or other
  modified_base (174472)..(174472): a, c, g, t, unknown or other
  modified_base (174474)..(174474): a, c, g, t, unknown or other
  modified_base (179059)..(179060): a, c, g, t, unknown or other
  modified_base (179064)..(179064): a, c, g, t, unknown or other
  modified_base (197001)..(197001): a, c, g, t, unknown or other
  modified_base (197004)..(197005): a, c, g, t, unknown or other
  modified_base (197007)..(197007): a, c, g, t, unknown or other
  modified_base (200349)..(200349): a, c, g, t, unknown or other
  modified_base (200351)..(200351): a, c, g, t, unknown or other
  modified_base (212425)..(212426): a, c, g, t, unknown or other
aagcttgaggtgagcagagattgcaccgctgtactccagcctgggtaacagagggagactccatctcaaaaaaaaatatatatatatatatatatatatgtatgtatgtatgtatgtatatatatgtgtatatatatatataattttaaaaattcatttatgttgctgcaaaaagttggagtaaattttttttttttttactgctgcgtagtattctattgtatgtatagactacattttgttcatcagttcagcaattggtggatatttagtttgttcccagtatttttgttagtttgttttgttttttactattagaaaagctttcagtattctctttgtgcacgtgtgcaagaatggtacatacccagaaatggaattgcagagctgtagtgtatgcagttcttcaacctcaccaaagtggttaagctcccataagtaggaatgcggtttctgttgcgccacatccctgccaatacttggtattgacagactttttactttttgcctttctgatgagttttgaatagtatttcactgtggtattcattgactttttcccttctagaatgttagagatctttccatgtgcattaagtaaatttgccttaaattgctgcagcctaggattgaagtacaccagagcttattccgtcaggtccctgctattgagctgtttccattctttttattttattttgtatttttatttttgcaattgcagtctgtgctgcaagtaaaaatccttgtgtatatcttctgcacatgtgagtttttctctargactgtggtctttacccccttctctgaagcccacaagcattggaaaaacaccagctctgtaaattgccccgttttttcccgtattcctgtaatatctgatagacgaaggagtatggtgtgaagtcatggagtcagtgttcagggccaaggccagtcttgcctgctgccaacactgtctccgctctgggcttcctcatcatgacaccttctacctcttcatctaccaaaggactttaggtcaggtggaaaacttacctttcacatcaaggaagggagatagggctggggcaggcgagaatgagcttgatccttctgccctgccaggcttctagggaccttttgtgtgtgtgtgtgacttgttaacatttttttgttctgagatttcacttgtctgtggcatagattttattattagtaactgatctaatactgcatgaaaaggcttgttttaaaattaatcatatgattactactgcctttttttttttttgagacggagtctcactctgttgcccacgctggtgtgcaatggcatgatctcagctgactgcagcctctatctcccagggtcaagcaattctcctgcctcagtctcctgagtagctgggattataagtgcccaccaccacgccaggctaattttttgtatttttagtagagacagggtttcaccatgtaggccaggctggtctcaaactcctgacctcaaatgatctacctgcctcggcctcccaaagtgctgggattataggcgtgagccaccgcgcctggccgattactactacctttaaaacaatgttttctatctgaggatgttgggataaaatccactctaggtatacattacaaccaagggcaacccctctagactagaatgctgcaggttatatttgcaaagagggctgtttccttttcttaggaattttgatcatttggacaggattccttcttgaaaggaatcagcactgaggcccttatatggaatatttccatcactccctagggttggcctgtgccctttcacagttccttccatcctccatgcctggctgtgggcaacccctgatctgccttctgtcactatagattagtggcatttcaagaggagcatttatatatttttaaaaagattcctcagagttttaactccaaaagctgccaagaaaattagattctgctaattgcatcatcagcaaacactgaaatctgttcattcaatattggcttccttctgtattcaatgaactgtcttttctttaaaaaatatctttaagaaatagtttggtacctgcaaaactttgatcactttttttcttttttaacaggtggtgctttgcatatcagttgatgtatctcaagactataaccaagtagagaatgtcataaaacaagtaagaggttgggctaattggaattcaccaatgtgcttgacttttgatttgttcttgccattttgctatgtggcttggaatggacacaacttctctataggtttaatagttttgtaaattttatttatcagcatggatttgctgctgagtggtttttcttctctgtttcttaatgcctgctctgctacatttttctaggcacaggagaaactgggtccagtggacatgctggtaaattgtgcaggaatggcagtgtcaggaaaatttgaagatcttgaagttagtacctttgaagtaagtaaaaatgtttgctcactgcagtagcacatatgctaaaagcagagcaagctacgggtaaaagctttaagaatcaattagatgaatgcattcagatgtccatggaagctttagaagactctagaggaaggctgaacaaggtgaagctgaacaaggttttcatcccagtgtcaggaccattgaagcttaagagtttagacattttacagctgagaaaaccagctaaaatgggaatggaccttctaatctgacacagattactgtagcagttcactgaggtcatattttcaagagaacactttgtaacctaagagatgccggatgttcctatcaaacatcagtattattaacaaggagaaaccaaaaaagttgaaggacagactcactagagttctcaaatcaagataaaaagatactgcatcttattgatgtttctatttttaatcaggtttaccaaggaacttctcttggtaatttatttcagcaccaaagaaatgaacactagatttgaaatttttattttttctttttttgagatggaatttcactctgtcactcaggctggagtgcagtggcgtgatctcagctcactgcaacctccacctctcaagttcaagtgattctcctgcttcagcctccctagtagctgggattacaggcacatgtcaccacacccagctaattttttttattttagtagagatgggtttacgccacgttggcccggctggtctcaaactcctgacctcaggtgactggcccacctctacctcccaaagtgctgggagtacaggcatgagccaccaggcccggcctgaaatgtttttaaaatggaaaacgttttttagttgccatcgcatcaacaatctttttcttccttttttttgagacagagtcttgctctgtcgctgaggctggagtacagtggcacgatctcggctcactgcaacctctgcctcccgggctcaagcggagtgtcctccagcctcctgtgaggatgaagctggggagtgtgttggtgtcttcgtgtgcgccgtctagacagactttcccttaaacctctctctttatctagacttactatccctagaaacagaacctccagtctcctgccaggctggaagaggggtacagatctaccctgtggagaggggaaaaacatctaagatctaactgcctttttttttcattgtcctacattatttttttaatttgaagtgaaattcatataacataaaattaactgtttttaaagtgagccatgcagagggattcagcatattcacaatgaggtgcacccaccccctccgcctagttctaaagcatatgcatcacccatagggcggccctcacctggtaagcagttgctccccatccctgctcacccccacacccaatctctgacaaccaccaatctgtattctgtctctggtcatttcgtatgattggaatcatgatatgtgcacttctgtgtctgacctctttctcttagcatcagtttttgaggctcatccacatgtagcatatatgggtgcctcattcctttttatagggtggtgatattcctttgtatggatcgaccacattctgtttagctattcatcatcgatggccatttgggctgtgtctagctgactgcttattaaatagactcttagtccctactcctgtctcagccccatgccagcccacccttccctccaccccagagactcttgcagctggagccttttggggttctgtagtagaatctggctttttagtttctccactccccgcttagcatttagttttttgtggtctgctaagttagttatccctcctcaacctgttcttcagcttccaaaaggttattgctgttatttttattcttattttctttgttcttgtgtgttcttgccttaaaaaacatctctttacggagattttagtaaggtttctaaagggagccaaagtaaacacaggcgttcagtgtgacgtcttttttcagatattcttttagaactttcttttttttttggagacggagtcttactctgtcacccaggctggagtgcagtggctcaatctcgggtcactgcagcctccacttcccaggctcaagcaattctcctgcctcagcctcccgagtagctgggattacagttgcccaccactatgcctggctaatttttttttttttttttttgtatttttagtagagtcgggttttcaccatgttggtcacgctggtctcgaactcctgacctcaggtaatccacctaccttggcctcccaaagtgctgggattacaggcatgagccaccgtgcccggcttagaacattttttattatcaaaacaatattatgttacgaaaacacacttttggaaaaaaaagagaatcccagcatcctaactcagtcacttatgatcttctgtatttccttggtcttccctctgagcatgtgtacttttacttaacctttgaagtaattacagttacagcatatatacagtctagcttctgctttttaaacttaaatagcatagatatttttccctgtcactcccagtgtttctggtcatcatttaaaacaattatctaggccaagtacagtggctcacacctgtaatcccaacactttgggaggccgaggcaggcagatcacttgaggtcaggagttcgagaccagcctgcccaacatggcgaaaccctatctctactaaaaatacaaaaaattagctaggcatggtggctggcgcctgtaatcccagctacttgggaggctgaggcaggagaatcgcttgaacccaggaggcagaggttacagtgagccaagatcacaccactgtactccagcctgggtgacaagagcaaaactccatttcaaacaaatacaaacaaacaacaataaaaaaatctaatattctcttgaattaagatattatgattgtatgttcatgttctgttcataatatgaaaaaaaattatgattgatctcaagttccacaattgaggtatttagtttttatttacatgatgatctaatatttttacaaatatttgaatatttgaaacattttaatgcaagtattattaaattttcgagttaaaatttaaggtttttaagagctcaggctaggcgcagtggctcatgcctgtaatcccatcactttgggaggtcaaggcaggagtactgctggagcccaggagttcaagaccagcctaggcaaaataaaaggaccctgttactacaaaaaatacaaaaattagctggacgtggtggcatgtgcctgtagtcccaggtcctcaagaggctgaggcaggaggattgcttgagcccaggagattgagactgcagtaagccaaggttgcaccattgcacttcagcctgggtgacagagtgagaccccgtctctaaaaaaaatgataatagtaaaaaagcaaaaaataaataaataaaaattaaaagcttccaagacaaggagaaaatacactattagtactcttacccatcataatgggagagccagtggttcttgaggtccaggactgtgctagcgcttgtgttttctcttttaatctttgcaacagccctatgcggtcatacccttgttgaccttgtttacagccaagaaaataagtagaatgtctgactttcttattcatcatcaaataggcaataaatgggagacccaaggcttgaaaccaaaactttaaatcaccctcctactctgtgtttttcttatagcttagaactaatagggctacaaatacttggaacctctttcctaaaactgtctttcagaaagtactacccacaaacatgcagtatactttttataaggagaaaactaactttgaccagttttcaggaaaaacattaactgctgtcatggtcagaatgcaagactagactgaaacagtcttcaaatggtaggtcctgagtcttcaaatgctaggtctcaaatcacatttcatttatatcatcatgtcatcattcattcattcagcaagcctgttgggcttcccagtcacttgagcttgcattgaagaactgaaatccagaaagcagactaaattctccatgtgcacagccttgaggcttttgacctcatgtggcctctttgttccctgcagaggttaatgagcatcaattacctgggcagcgtgtaccccagccgggccgtgatcaccaccatgaaggagcgccgggtgggcaggatcgtgtttgtgtcctcccaggcaggacagttgggattattcggtttcacagcctactctgcatccaagtttgccataaggggattggcagaagctttgcagatggaggtaaaagttgtattcatttttgtatttattcctctccgctcagcaatatacattccgctttagttttatagcttctttacatgtgttgttgtattaaattagagatttttaggtttgacattggtgaaagagaattggctcaaccctgagttttgcagttaacatttttcattgcatgaagactatagttaacgacagatgcaaaatggtaatgggatttttgcttgtttaacttaatacacaaaatattagtgatatcttcatagtgttattagtctaatactgtgtgaatgtgagtaaggttaaccagatattttattttatagagatttttctttaacaagaagtttgtccttatgactgaataatacgtgaaattagtatatgtttgagggaagagcttgaatcagctgctaatttttagcttttagacaagtcatttaacttgctctcagtttcctcatctgtaaaatgggagggttggaataaagcaataatttgactctcccaatatttatatttttatatcttaaagaattgttgggaaaatgaatgctttttatttacatagttaatggaacattttgtggaagaaggatgtagttaggatttgcatcaaaatagcgtctgtcatgatgagtgcaactttacacctcagctgcttgaagccgacttccacattattgtcacacaggaatgcttagagagcatcacatacgtatctacccaaaaatcacatgctgaaaaaggcaagggaaagttctttctattgctgtgtacagtcatcccctcttatccgcaagggatgtgagctaagacccccagtggatgcctaaaatgttaagagcccagaagagtattcactgtggccaaccctcttatagtaagagtgtgcttttgggaatcctggttgatgatttagatcaggggttgacagaactttcaccaaagggcagacagtatatatgttaggttttaaaggctgaatggtgcctaatacagctacttaagtaggctatgatagcaggaaagcagccttactagacaatgtgtaaatgaacaattgtcactgtgttccaataaaactttacttataaaaaacaggcagagggccagatctggctcataggccataatttgctgacccctgtttagaagaccccataagagaccttgatggtgtgtgatagagcaccacattggtgagatatgggacgagcgttgcagtacagatgagctgctgggacagcgacagtcctgatgtgccgcgtagggactgatagatcatgccattctcataccataggaaccagccacagattttattgttatcaactggcctaatactcttaataatatatcgtgataatatgcttagccaataggacactgatgtctgtgaaatttcaaacaagaatactggtgtttcttttgaagtttttaactttgaaaagtccttttgtgaataactgttttatttatttttattttattatttttttttagagacagcgtctctctttgttgcccaggctggagcgcagtggcacaatcatagctcactgcagccctgagctccttggctcaagtgatcctcctgtctcagcctcccaagtagctaagaccacaagtgcacactaccatgcctggctaatttttaaaattttttgtagagaaggggtctcactgtgttgccaaagctggtctcaaacgcctaagctcaaacaatcttctggctttagcctcccaaagtgctgggattacaggtgtgagccagcacacccagccaccattttataaagttttgtaaagtatgtgagggagatgttgtgatgccacctgatgagaggaaaacccagttttcagtaaattcagtgtgttgctcaaagtcacatagttacttagtgacagaaatcacaacacgatccaagccttgaccccaggtctgctgcccttttgcagcagatgatgcatccagctagttgcttcacctggctagttgccccggccctttactttggttttagaatccttgtaggtgaaggggtggttgcgggatgaagaatctgcccattagggctttttgcagagctgtgtcagcattcactaatttagagcaaagtatataatctgggtggcctggtttcacttcaagtagaacagagatgctaaaaaagaggaaaaagaaagtggattgctggtacagacagagccccccaacctctgtgacaagtgtgatttgcatactgcgagtagccggcctgcacgctcaagtctgtatgacttctgtccttatttggactctattaaaaataccctcacttaaaaaaaagaaaataaaatgaacttatcccatgaaaaataggttctggggaaaacgaacgcagtcatcaaaatgtagtttgttcgtagtagaacttgcatcaaaccaattattgtgtccctacagtaattatagtagcattttttttgaaacctggataatttggtcaaggtaggtgtgttttctgtcaatgaaatcttatgtaattgctcaaactccagatacttttttttttttttttaatttttattttctgaagacagagtcttgctttgttgccgaggctggagtgcagtggtttgatcttggctcactgtagcctccacttcctgggcccaagcagtcctcccacctcagcctcccaagtagctgggactacaagtgtgtactaccatgcctcaccgtttttttgtttattttttatttatttattttttgtagacatggggtctcgctcgctatgttgcctgggctggtcttgatctcctggactcaggtgatccacctgccttggcctcccaaagttctgggattacaggaggtgtgagccactgtgtctggcctgtaaatatttttgacaattctttggtttaattaactttgaagtctccctgtccacctccctttgcccccaaactaaggtaggaccctggcattgttaagggtactatgagtaattttaaaagaatgctttgttggcattttttagtcttttttttttactcagtcttttaggaagaaaggtaaagattttaaaagttactcttttggaaagcagacttctgaggtgggttatagctaaagatgtggtagcagagaccaagcccaaaaaaaacaaactgatgctcccttttctgcttttcttaccctgatcatgcccctctcctcccatctcttccttctgtggtctgaaagtaagctaaagcttgaattctggagtttcatgtaaacagctgtgatcttctttccagcatcccctgtctttgttttgatggaatagggaacagcacatcctatgtggattattttaataacaaatctgttcttttttttttttttttttttttttgagatggagtctcactctgtggcccaggctggagtgcagttgtgtgatctcggttcactgaaacctctgcctccctggttcaagcgattctcctggctcagcctcccaagtgggtgggattacaggtgcccaccaccatgcccggctaatttttgtatttttagtagagatggggtttcaccatgttggccaggctggtcttgaactcaggtgatctgcctgcctcggcctcccaaagtgctgggattacatatgtgagccactgcacccggcccacaaatcggttcttgaacaagtggtcagttgtctttctgtttgaggttgaggccagggagaagggaagaagtaatagtaggatggatgtggggcagagtcgggggcacagagaatggtcaggcaacagggatgaggagaagcagtggccgggcagcaggggactcagttagtgaggacctggctcatccattcttagaaagagtggtgatctcagggagctagcattgtctcataagaacaagtaaagccagcctaccctcatttttttttatgacagggttatgagattggtagattaaaagaagatgtagatgtggtttagtatattcagattttagcaaattatttgaccaagagtttcaggaaactagaatcttaaccttatgctttgttcttagaacgatactggcatgtagaagtaattcagtaagtgctcgttgttgcatgaataaataaaataatatgtaaatggtgaggtgactagccactggaggtatccagccagagactgggagagtcatttggttggatggcatagcgagaataccaatctaggaagcgactggactggtttctcccaaccccagctatctgtgttccttcctcatgaggaagctgttctgaaaagctctgttttaacctttggcaatgcagccgtaaccttgagtttgagaagcactgctctgaaatcctgtcttccattagctttggagccagcatccttctttaccatgagagagaaggcagaggggcagcacagacgtgagtttctgggcagtcgatgtcagtctttatgtgggctgcctaatgaccactcgttggattttttgtggtgtttttctctggtctatgcacagcagagggcaaggctgggggagacaaggtttttataagtcactatctcaaaaacaagtggaagcgagtttctggctcatctgccttactacctggccccgatccagagctatttatgagcatggctgggccgtgaagctgcatgccctggcaatgcccggtggatgggctgtcccacaccctaattgtgctggaatggaacccacaaagacatctcactttcacgactgcactttccaggatggctggcctggatcttctgcttgcaggcctgtgcgtgcttctccttccccttgaagctccccttaaagccctcaaaactgtgcttcactgaaggaaccagggcgaaaaagggctgcataagatgagactctgggctactgtttttatttttttgttgtttttttgttgtttttttttttgggatggagtctccctcttgtcacccaggctggagtacagtggcacgatctcaactcactgcaacttccgcctcctgggctcaagcaattctcctgcctcagcctcccaagtagttgggattataggcacccgccaccacacccagctaatttttgcatgtttactaaagacagggtttcaccatgttagccagactggtctcgaactcctgacctcaggtgatccaccccctcccctcggcctcccaaaatgttgggattacaggtgtgagccactgcccccggcccctgggctactcttaaaggccgtcacattaggcagtggtgttgatttttagcctagggtacccttctgaagatgtgcagtggctgatctatcagctgcctctccacttccagatcccttaggtgtttcctagggacaaaaaagtgagccaataccaaataaaaatcatggcaaagagattttcatggtaggaaccattgctcttagagttgctaattagcagggcaagataagcatgtgcagcagggctgtggctgagcagtctgtgggagggggtgtcctggccaacagcagaagaatctgctggaattgttgggggtgtgtgtatgagtggggtcgtgaagcgtgaagtgtgcaggcatggtggtgaggcacacaagtgtaacaacctgctccaagtgtcagatttagaggagccacatagagtttcagataaggcagagggctttccctatgtgaatgcaggttgaggttgtccacaggggaggtacttggctggtctgacttggaggttctacccagtggttcttgttggttcagtggaggaggaagtgactcttgacctcctaatgtgcagaggccggttatacagggagctctggaataagcagacttctcagggacagttctggactgggtttggagtagggcacaagaaagggatagggcagcagattttaatgaccccaatgtattttgtggatgaaatcaacacaagagtatcagaagcagtctgaaggaaaaacagatgtacagtctggtgaagaaaggaggggcagactggtcccattgccttgataaagggcttggatgctgtgcagtgcgtgtgggaactggactctttttaaaacactgccctcgtcggacggctcccagggcctctgtctgggcagcaggagtggaagacactgcaaaggaggtgacttgccatactttagggccagctgttttctggggtccaggttagggtgagctttttgcctacattctggaatcatcatggagaggggtttctcaatgcaattggtgtagttccccgcctaacagaatcaccccattgttctcaccgctttttgggaatcagggcagccagtgcaggttggcagtgtaggacctcagtgtgtcttgtttactgaaggtacacgtgttgttttgaaatgcaggtgaagccatataatgtctacatcacagttgcttacccaccagacacagacacacctggctttgccgaagaaaacagaacaaaggtcagtatcctacatgtcccaatttgaacctctaatgtttactgcttttctgattttctttctactcttcagctcacactcgttttcaccaatcaacaatgtttgttgggtagagtgcctagctggtttctgatgaccttgagattctccaggcaaatattccttctttccttcctcttttccctcactttattttcttaaagtttaaatttctaccagattttttctctatagagacagggcctcactctgccatccaggctggagtgcagtggtacaatcgtggctaactgcatcctcaaactctcaggctcaagcaatcctcctgcctcagccacctgagtagctgggcctacaggcatgtgccaccacacctagctaatttttaatttttttgtagagatggagtctcactatgtcgcccaggctggtgtcaaactcctggcctcaagtgatcctccctcctcagcctcccaggtgctgagattataggcatgagccattgtacccagccatttccagcacatttttatcaaagaagtatgtcacacagttttagagtccaatatcaatcctttgcctcatctctcccattcccaattcctactccctagaggtagccatttattttaactaacatgtttatactgctttttttttttttaagatttagaaattatttattgactttctaccgtggaagataaaatttaagaccaggccaggcacagtgtggctcatgcctgtaatcccagcactttgggaggcctaggcaagaagatcacttgaggccaggagttcaagaccagcctgggcaacataacaaaaccctgtctctacaaaaaatttaaaaattagccaggcatggtggcacatgcttgtagttccagctactcaggaggctgaggtgggaggatcatttgagccagggaggttgaggctgcagtgagccatgattgtagtactgcatttcgacctgggtgacagagcgagaaccaatatctaaaaaaaaaaaaaattaaaattaaaaataaaaaaataaaaatttaaggccagccatggtgtctcacacctgtaatcccagtactttgggaggccatggcaggaggattgattgagcccaggagttcgagaccagcctaggcaacatagcaagaccctttccctacaaaaaaataagcaaaattagaattgttccagctactcaggaggctaaggtggaaggatagtgtattagtccgttcttgcattactataaataaatgcctgagattgggtaatttacacgtaaaagaggtttaatttgctcacagttccacaggctgtacagtctgctgcttctggggaggcctcaggaaacttacagtcttaggtaaagggaaagcaggtacgtcttacgtggtcggagcaggaggaagagagagaggggaggtgccacacacttttaaacaaccagatctcgtgagaactcactcagtatcacgagaatagcaagagggaaatccacccccatgatccagtgacctcccaccaggtccctcctccaacattggggattgtagttggacctgagatttgcatggggacacagatccgaaccatatcagatagtttgagcctaggacgtcgaggctgcagtgagccaagattgcgccactgcactccagcctgggcaatagagtaagacttgtttcaaaacaaaaacattaagactcatatctgttccccattccctgtgtactcctcccatctctttagttaaatcaggtttagtgctcatattaatattatgcacacttggaccattctatagtgacatttcctttcttgccttttcatttgcttagctttgtaattatctataactaattcagtcccagattcaaacagaactgagattctccttttgatccatgtgagcacattggacattctattagattcattcttttttcctcagacatttctcctggggtcgtccccgttcctggtctgttctagttctgccacccagcggtggtgtcaggacttgtcttcacctcacactgcacgttcccttctcccctccctttgacggagcccatgactctcacttttttggtttatctgctcattttggtggagctataatattttccaccaattttctgagaaagggcacatcagaggtaatattgttttagaaacaacatgtctgaaaatgcctttatttttattttaaccttttttttttttttttttgtgatagagtcttgctctgtcacccatgctggagtgcagtggtgcaatgttggctcactgcaacctctgcctcctgggttcaagagattctcgtgcctcagcctcctgagtagctgggattacaggtgcgtgccaccaagcccggctgattttttgtatttttttttagtagagacggggtttcaccatgttggccaggctggtctccaactcctggcccactctggcctcccaaagtgctgggattacaggcataagccactgtgcctggccatttttctttattcttatgtattgttttgttaagtacagatttctagtttggaaataatgtttcctcagatttctgtgagcatttattgatttccagcttccagaatttctgtggaatccagtgctattttgattcccaaccttttgtatagaacctgtttttccatttatttttggaaaccttgtgtccctttttatccttatttaatggattttggcatgaaatcttctcatttcatatgagcccttttattttatcaacttttgttctgggacattttattatattactccttttatcacttctttcttcccaaagtatttcaagtgttcattctctctggagcatttattattcagatttttgaactttctggactgatcctctaatttccttctattttctctctctttttttttttaatctcttgggccttttgttctcccttctaggtttttattcgctttatccttaaacctttttgttgaaatctttatttctactgggttacataaaaattactttagatctcttttctctgaatatttaaaacagtttttaaaaatagcttcttgccttatttcatggatttcatattttctcttatgtctaaggatattcactctggatgtttagccttgtttttttgttgctgttgttttgtttgaaaatttcttctatatcttgtattatttatttcctcctactttctttttctctgttgttgttttttccggcttcctgaaatgtctgttgatccttgattgtccatatttaagagtgatgcactaaaatgccaattgtaaatctctagcttctcagctgtttactataggatgatcaggaggggatgcagccacttcattagaagattctcatatgccagcatctgctcacttttctcatggtttgatcagtttccctactgaggaatcatgtcttcttctgcctttgggagagtaagacttgctgtctgtgttgtgggaggcaagcagggcaggagggctggggagctcaccacctacgtgccaacttttgcttaatttttctgtttctacaaagtgccttataactactcttagtggtgagaattaagaatctggttagtaaattgctaatcttttgccatcgtagaggagatgacttggggtctgatgatttgagtctccattgcacttatcacagcttataacagaagcttctcatagcacttaaaacagacatatcttttatataaaatgactgccagtcatcctgagctgaatataagcttcacactttttcaatggaatattccctttgccttgacacatagtagttgcttttttgagcaaatgaataggtgaagcgggaagaaaggaattaatcagaacttaccaccttgaactgtggccaattttagttttatatatttttttctcttttatacgaatactttgtaaatgtgaatctctgcagcataaaaattggcacttaaactccctagactgtatatttgtagaaagatgtttgtgatttaggttttttccccctattcttttctctttggctctgcctttttaaaaattactgctatttcaaagaagtaaatttaagccaaatgtcctgtcttagaataagcagagatcttctaagcagctttgcaacattcggtatgcagtcttttagtttgaagccagagctgacaaagggtggtgatttccctgttaaggtttgattctgatgttgattaagttggggttttttcagtaaaattttgggcagacttgttgggggtaaatacaattctacattgatgtgtgggccctttagggggcgccatagtactttagaatcttatgtgtatttagtgtggttatgccagcctgggggtctggaagaatgaatcgtggctccttcaaaacagcctttctcttaagaaaggttcataagaaatacttgatctttatgaaatactttactttcctattttaagaaaatataatctggtttttattttctttaattccttcaagcttacgtggtaaagtttacagtctcatgcagtttaaggcttttgtttgacacttctacttgaaattatttgacacttctaattgaaactaactgaaataatttttgagcacacatatgcaagacatcgcaaagaaaagccaaagataaataatttcttacaaaaaaggccctgcccacaagaaacttaggaggtaaaatgcaaatgcacaagtagctataatgtgtattaaaacagaaatgttcacagaagaaagagagaggttactgccagttaggtatttagggaaggctttttgagttaggtaagagttgagatggaccttttgaggaagaaaaggctaagatttggggtctgcagctccagcctggtaactagcatgcagcccatctagggaccactcagggttatctcctaagtggctccttctgtttcagtgtcctgtgcatttgcctcctcagcaagtcctttaagaagcatctgcagttgttgaatgggggctgggttgcgactgtccctgccttgggcgccaggttcatccccagggatcagccctctgctgacctgggaatatggtcagaatggagttgctggtcttgggagcaggcttgctctggacacaggtctagcctctacagaaaagcaccatcattcaggtgtccggccagcactgaggagtcaaagggggtctttctgaacttgtatccagtgatgtgttctcactctagctttgatggtcctcagtggagccaagactccgtatgttctaagagaatggcaaaggcctccttgtcttgtgttagctactgggtagaattttacgtagtaactaggtagacactgatttagaatccagatggaccttattctagaaataggaatctgcccaaaggtagaaaattggaattatttgtaaatcaggaggctgtaagaataatttatttttaatgtaatgggcaatcatgatattgttatgtacatgtttttccacttttagcctttggagactcgacttatttcagagaccacatctgtgtgcaaaccagaacaggtggccaaacaaattgttaaagatgccatagtaagtaaaatccttgttttctgtactatttgtgtttgtagtactatatttctgaaaagatatttgtccaaggacttacttcaaaacatcaattattagaattttttagtctgtcagatttgtcatatctaatattggactcaacttttcttcttttagacgctttattgactccatattagtgagtagcctcctgaaaactgattgtataccttaatctgaggaacaggtttactagaaggatgtctggaaacaccggttctttaaaaagaaaatgagactttcctatgagtgtaaacgatatatactatgtcccatatacacctggctgctttctctcccattcctgcttcccagtatcattttcccaaaagttagctaacgagaaagtgccaccagccccgtgggcctgtcctcctgtcttccctgttgatatgttttttaattcagaatcaaaaatggtattttaagaaatgatgtgctgttttgtagaagaacaacatatgtgcctcatgctttttgacaacatttctgttaatgcggaaaaatgcacatttatgagggatgtctgtaaaccacagacccacactgaatttggaaaatctataggaccattggaatgagaggtgtcagcacatggtggacagccttgaagtggcctaaatgctgtcacattagactgaactgagcagaatgagaatagtgaattctgttgaaatatatacatgtgtgaagaactttgtcctgagtgcattaaaaggctcaggaagatggcacaagtgagactttatttttcctgcttatctcgggtcaaagcaaatgcatttggtgttttttgttgttgttgttgttttgtttgtttgtttgttttgagacggagttttgctcttgttgcccaggctggagtgcagtggcacgatcttggctcactgcaacctctgcctcctgggtttaagtgattctcctgcctcggccttctgagtagctgggattacaggtgctcacaaccacacctggctaattttttgtatttgtagtagaaatggggcttcaccatgttggccaggctggtctcgaactcctgatttcgggtaatccgcacgcctcagcctcttggccaaagtgctgggattacaggcgtgagctccgtgcccagcccattcagtgtttctaatgatgctaaatagctcttagtattttggcagtattcatttagtttagtggttttcaaacttttcttctcttgaccactttacattcttacaaattgtcaacaaccccagagaacttttgtttatttacatggctatatttattgatatttgccatatttgaaatggaagctgtttgtaatatttattgattcattaaaaataacaaaaatggctgggcacagtgactcgtgcctgtaatcccaacactttgggaggccaaggcgggcggatcacctgaagtcaggagttcaataccagcctgaccaatatgatgaaaccccgtctctactaaaaatacaaaaattagtcgggtgtggtgacatgcgcctgtaatcccagctacttgggaggctgagacaggagaatcgcttgaacccaggaggtggagactgcagtgagctgagattgagccattgtgctccagcctgggcaacaagagcaaaactccatatatatatatatatatatatattcacatatatatatatataaagtcacatatatatatatataaagtcacatatatataaagtgactttttttaaacaaaatttactacttttcaaaacaaaagttcagtgaggacggtggcattggttcacattttcaccagttgctttaaggtctgcattaacagctggattcaaatagctgcttctgcattccatctgttgtaataatgttgttttgatggaaggatatacagaaaatctggcctgagacagatacggagttgggaaagggaagactattttactaggcttttcagataattatggacattcttttttgatatcaaacccaaactcaacaaatggtagtttcttaaaggttagttgcagtatagaattggaaactacatcaatgaatgttttgttctctgttacattaaattccattggtccgtcttgtactttgaatggatcttttaaccattcatgatttcgtaacattatgcattagtcatttggaaaatatgggttgactgagtgatcagaaaaatcgctttcatcagtattactgctgatcttatcataaaagtatgcagctgacagtctcgtgatggtggatactagtttttccaaatcttaattttttcttgaaggctcagatttcacattgatgacacgtggccagttgtttttcctgaagtgacacacttgcttgcttcgctttctgcacatctgccacatacctaagtctgaattactatagatttcctgtcaatggtctttcatataaaaattatgctctccagccaggcacggtggctcatgcctgtaatcccagcacttttggaggccgaggcggctggattgcttgagctcaggggtttgagaccagcctggccaacatggtgaaaccccatctctactaaaaatacaaaaattacccgggtgtggtggtgcatgcctgtaatcccagctacttgggagtctgaggcaggagaatcacttgaacctgggaggcagaggttgcagtgagcagagatcacaccactgcattccagcctgggccacagagtgagattctgtcgaaaataaataaataaacaatacaaatgatgctccatgaaagaagtggcagtttagcccttgacttcaggagctgcacaaggacttttgttccaggcagttgtcccgccctggaatgcagtgctgcggaagcgcgttgggcgcattctcatttgtcacacagagtattaagaagacatgtcctcgagggttgccattgaacaaaatgatgaattttcctgctttatcaagaggattttaaagcaaaactgacactttgatttttaaaagaattttagaacttgtattttctttgtgtattatttattactgcgagtgcgtgtggtagtagaggtgacaatgactcctagtacagtttggcaagaaccccgtggttcttgcccatgtctctgcagttttgcagaggcaaaactgtattttccatacaacacactgtggaaaagacaatgaatgtcttagtgttattaggacaatcatttgtccttgggggcccgcaggggtccgtggactcacttgttgagaactgccatctgccaaggccgtgcgtccatttctgagtgctgatcaatgctttgtgaccattttatctcacttaaagtgaacgagcacactccactgtttctgatgtgtccgactgatttctgtccacattactaggattccctctttctcttctttttcttctcttttagcaaggaaatttcaacagttcccttggctcagatgggtacatgctctcggccctgacctgtgggatggctccagtaacttctattactgaggggctccagcaggtaagctctgcctaggctagcaatcagacaggccgatggacaagagaaaaactgcctttcatcaaaccttgatgagaagaggttaagggaaaactaagtaactttatttgacaatgtatttttatggagctatcaacttttcctcttcctccaccaggaatgagtaaataggttaaagatataacttcaggaatttagaatggcaagaagtcttcagtgccgggccttgcagatagagaaataaaacaccgtatctgctgttgaggtgttaacctggattttcacctaagaaccactgctccaatgtgttttgaaaatggaatactcctctagagtaaggggtagccttgcttaaaaagtactgggatattagactagaaaaccttttctaggtgaatcaggtcacacacagctaaatttagtgagacacgaatcatggattaaacagttgcttcgcttatagaatgtattattttgtccaagatacacagtgtttcattggtgtgctaggcactgtacttgctcatggggaatcagatggaaggcgacctctccagcttcaggggcatacagtcaagtggaatgcactgaccaaaaaggtgatagtagtccgggcgcggtggctcacgcctgtaatcccagcactttgagaggctgaggtgggtagatcacttgagatcaggagtttgagaccagcctggccaagatggtgaaactgtttctactaaaaacacaaaaattagctgggcatggtggcggacgcctgtaatcccagctactcgggaggttgaggtaggagaattacttgaacccgggaggtggaggttgcagtgagccgagatcaagccactgcactccagcctaggctacaagggcaaaactctgtctcaaaaaaaaaaaaaaagatagtagtgcagtgtaatgaagtaggggttacaatagagggaatgctctggaaagacaaagccatgggatagttgttaacaagtactaaattctgtgcagtcaaccacattcagacttatataaatgacttagttgttggttttcttcagggtctttcccaagccctcttttcttttcattctgtaatgtacctactgtctttgccattctcttagaggttgacactgtgttagatgtaagctctttgaggaccaggcccacacctcttgtttgccgttgtacccctaacagccagcgcctggcacttagtaggaactccagaatccctgagctgaacaaatgcatgaattcttttatgttttaatttttgggctggcatggtggctcacacctggcgtgttgtcctggactcccctgcttctgtccctcacgtcagagatcattgtcatccttgtcactcagttcttcacattcttccattctctgcaattctggcagtgcttctggagcccaggcctgggttgccgcagcaggccccctgcttgagttacacactttttgagccagaggttgtaaacgattcccatgggcctgtaaagcagttttgttgggtccatctggtgtgagtgtgtgtgtttaagattttaaaatagttttaaaattaggttttatataaaaggtccagatttcagacttttcttggaaaatcagaaggtttagctgcacagagtctgcattcttacctggcagtcatcagcaagcacaggtggcagctgctcctgagggaggagcacagtccctgcaaccactatggtctgcaaccccctgctcaggccccctggatgcgtttgagtgtaccctcacattttccacaccagttgtttctaaactgcaactatacattgcatgaaaacattcaatgactccttgataccatcaggataaagctttaaaaattccattgcacctgagtatggtggctcatgcctataatctcagcactttgggaggccaagtcaggaggatcgcttgagctcaggagtttgagatcagcctgggcaacatagtgagaccctgtctctacaaaaaaatgtaaaagaaaagaaagccaggcgtggtggtgtgtacctgtattcctagcaactgggagacttctgcttgagtccagaagtctgaagctacagtgagctgtgatcatactcctgcactccagcctgggtgacagagcaagaccctgtctctaaaaaggatttaaaaattaaaaaaatttccatcgcatgccataaaccacctgatctcctaccccacgtacctttccaggctcttttttttctttctttctttacccatcttcttctttttggaatcttctctgtgtcctgccaacttctaatccttcaggtctcaccttaaatattgttttttccggaagatccaaggactggcttcagtgctctgagggtgtagggaaaaaaacaaagggatttttctattctcttttttttttttttttttttttgagacggagtcttgctctgtcacccaggctgaagtgcagtggcacgatctcagctcactgcacgctctgcctcctgggttcacaccattctcctgcctcagcctccccagcagcttggactacaggcgcacaccgccacacgcggataatttttttgtatttttagtagagatggggtttcaccgtgttagccaggatggtctcaatctcctgacctcgtgatccacccgcctcggcctcccaaagtgctgggattacaggcgtgagccaccgcgcccggcctgatttttccattctcttatgcacggggactcatgcctatggtcccagctgcttgggaggatgaggcaggagaatcctttgagtttgggaggtcaaagctatagtgagccgcgttcatgccactgcactccatcctgagcaacaggatatcagtaatcacgggtctcaaccctgaggcagtagtttcaattttacttgtctttccagcctgagaataagctcattgagggcagggactgtgtctctcaccacagtgttcacagcacctagtatagggtctcgctttcatgctcagaacataaattgcaaaccaaaaaagccttgattgtagtttggctatttgagatgctgcagtgggtctttttaaagctattataaccctaagactgcaagcaatatatattttattctgcttatggtttgaatttattaattggacaaatattttgttatgtatctgggctgtccagcggtgcagagcacacacattctgttctcacagcttactgacatttacagagttttcattatattcatccttagagcagactagaagatttgtcttagaaactgtttgttagagacctaggtaccttgaaatagtcttgtaccgttggatgcactaaaagctctctctttatcttgcaggtggtcaccatgggccttttccgcactattgctttgttttaccttggaagttttgacagcatagttcgtcgctgcatgatgcagagagaaaaatctgaaaatgcagacaaaactgcctaatcttcttaccccttggaagaagactgtttccaaataatttgaacagcttgctgctaaatgggacccaatttttggcctatagacacttatgtattgttttcgaatacgtcagattggaccagtgctcttcaggaatgtggctgcaagcaaggggctagaagttcacctcctgacagtattattaatactatgcaaatatggaataggagaccatttgattttctaggctttgtggtagagaggtgaaggtatgagaattaatagcgtgtgaacaaagtaaagaacaggattccagaatgatcattaaatttgtttctatttattcttttttgcccccctagagattaagtccagaaatgtactttctggcacataaagaaatcttgaggactttgtttaaaccttccataaaaaaacaattttcggtttctcgggttctctctctctctctctctgtctctctgtctctctgtctctctgtctctctgtctctctgtctctctctctctctctctttctttctttgtgtattttattcaagatgagttggacccattgccagtgagtctgaatgtcactgacagccctgtgttgtgctcaggactcactctgctgctggtggaaactcatggcttctctctctctttgatcccataaagctacgagggggacgggagagggcagtgcaatgggaagtaaagagatattttccagtaggaaaagcaatgctttcttgtctttagactcaaatgcttagggaacgtttcatttctcattcatggggaaaggcagcctccttaaatgttttctgaagagcggtaaaatctagaagcttaagaatttacagttccttcaataaccatgatgacctgaagttcacctatcccattttagcatctacttgtttttcccatctcttcctttccaattttgcttatactgctgtaatatttttgtaaaaaaaaaaaaaaaggaaaaaaaagaccagctaaaattttcgacttgactttttaacttaactcatgaattaattaaagcaaatgaaaaaattaaaaagtgtgactttttctcggagcatatatgtagcttttaggaaaggctgatgatggtataaagtttgctcattaagaaaaaaagacaaggctgattttgaagagagttgcttttgaaataaaatgatcacctgttctttatgtgactctcccactgaacctgcagacattatttttataccacatgctaaggaagcccactcatctaactctgtagccctggaaaccctcttggcccctgaatgttgtttccaggttataggatctgtgttcattagtggattttgacagcaagtgcctctgatgagttttagccaacattccccgttgcatcctgctcattgttcacactcctctgacttgaggagagctgccttcaccttgatcttgtaacctgtcttccttgcatatacggtagcacattccagatcacttcggtgagaaaagacctctgtttttgaagaggaaactttcttaaattgtaaaataaaacttaaaaaacataaaaactctatacaaaaattgaagacctaaaaattatagcataccttttttttgctcttgagtttttgaagctcttgactttaaatgacttaactttttaaaaaataagatgttttatggctttaacccatgtttttattaagatctgagaatagcatattttaaacactgatagatacagaagaaattattatttaatatataaattgcttggaatgatttcattgcagcttgtaaggatgggttgatgccagaatggtttcataaatctttcagtcttacagagccaaagtttgcagattatatcgagttgcgttgtgcagctgctaaaatggaatcatagctttttataatttgcagaaaacaattgcattaatgtctggatgtttctcagttttattcttttctcataaatgttcctcgaatgttggcaccttctactgctgatctatattagaatctagtccaagaaagtgtctgatttaataacattaaatagttatttcaatatattttttcaaattatcctcatagaacctgttgcctccagtgagatggtaatctactacccgaataaatttaagagcacctgttgagagcccctgttttgcggtagaagacaattgtccctatcccaatttccactgaaatatgagagcagatttgcagagaccatcatgtcagagaagaaatttccttgtcagagatgttaaagggctacagtcccttagcaaagaaacttcgaaatctaagttggtttgtgtttttctaaatttgataccgtaattcatttggcagcaaaatctgacttgaactgatgtgagagtattgtactttatatttatgctacttcattgtgacttaattttccctgaagaaatatccatggatttgattataggttttcccttagatgctgtggaggtgttttgtaatattcaaaatatgcccatattgcctttttaaaaccccaaagattatgaattctgaaacacatccagcccagcgggttttggataaggggttgtaggcatttaagcagcctcacataatgggctgacttcatccaaaacatgaaaatattacaaggcaaattctattttttatattttttggttcaatgcttgaacaacttgtttttctgctgggggaagaaaaaaagaaccaaccctgagtgtgattgttacggaaactaatgactttgtttttaaaggatcacattgattcaacaccttctattggacccagaagtgcgtaaatattacctatggtagtaaacgtttaattatcattcagtttaaatgttggccttctgtatgtagccaagaacagctcattttgtgaatttcagtttttaagtggctgctttttgatttggttgtattattttattataatgtatttgcaagtatattaaaaaattaacattgagccataaaaatccccaaatatgttcaaggacttcataattgaaaaatatatagaaaacaatccttacttctttttacaaaaacaaaatcatgggaattattcttttctatatatttagttataaatctttctctgggccgggcgtggtggctcacgccagtaatcccagcactttgggaggctgagacaggcgaatcacgaggtcaggagttcgagaccagcctggccaacatggtgaaaccccgtctctactgaaaatacaaaaaattagctggacacggtggcaggcgcctgtgtgtggcgggcgccagctactcaggaggctgaggcaggagaatcgcttgaacccaggaggcagaggttgcagtgagccaagattgcgccactgcactccagcctaggtgacagtgcgagactctgtctcaaaaaaaaaaaaaaagaaaaaaaatctttatctggatctgttaaaccatatattattgatcattgcaagtgaaattttgagagattgtttctagtatttaggtgatgaaaacatttggtaatattgctttggttcaaagaattttatgtctttatctttctagaagaaagcaattatatatatatttttgctaaattacataaacatttaattacatcaggttctaatttaaacatgtattactcacttgaggccacttttaaatattcatactctttgacataagatgctttgtatatttctcatttcttttagttcttagtaagtcagctttaaaaagtacctgccaaccagaaccttccatattctggactaaatcttgctcttcggattatacttcagtgcagtaactgtggatttgcaattttgaaggggagatagtagctattatattttacacttgcttgatgtgataactctaaagactttttaactgataaaagcgcacatggctattttgatacacaaagttgtgtttgctactttagaagcttttgtggcagaattgtaatctaattttcataccttgtatttctgaatcacaacaaaaaaataaatggggaacaagacttacagatttgcaaacttatttatctagaagtttgtgttttttaagagaccatttgggcaaaacataaatgttttctataatgttatcctgactttgcatcctaagcatttcaccaggcctgatttttatcattttttaggaagtaatatttgtggagtaaatacttggtattctgagctcttgtgtcaagtaggttctgttcgtatcactatgatgtgggatatacgagtaaaagtttaagaaatgtgaatttagcaaaatttcttaaacaagtacgttttctatacaaatatatttctcatactttaaacgaaaacctgatattccaaccatgtaatatctcccagatcctgatgggcagcaaattatacaagactgatatggaaaagaacatgcctcgatatttatcagttcgtaaacagaaaggttttggaacattgagaagagatttcttggacatcgtggtttgcaagcttaatctttctttacatgtgagcaatttatatacataaatggcatgtgatattatatctgtaatttttgtttggatatttaaaggacaaaattatgtgttttgtttgtttgtttgtttgtgatggagtcttgccctgtcgccaggctggagcgtagtggcatgatcttggctcactgcaacctccgactccctggttcaagcaattgtcctgcctcagcctcctgagtagctgggattacaggcacgcgcccccacgcccagctaatttttgtatttttagtagagacggggtttcaccatgttggccaggctggtcttgaactcctgacctggtgatctgcccgccttggcctctcaaagtgctgggattacaggcgtgagccaccacgcccaaccccaaattatgttttgatttctgttacactcctgattttataacctccattttgcctcatccatcatatatttgttgggtactaatgatgagcttggtatcaggtgctggggatacaattatatatcaacaacttgttccttcctcatggcaattacttttcttgtttcttcaccttctcccatccttcatccctcagatggctctgctatatccttacaagtctcttagacaaagaggaaccattccccattttcttctttggcttggagcctctgaattttaggcttcaaatctttgtatgctaagcactgttctaagctggaaagactccaaggaaaaataggatccctgccctcgaatagtttataatctagtgagaaggatatatgccagagattacactgatctgagaatagcggtgattaagataccataaccaacactgaaaacaggtaccagtcacttgtgagtgctttacatgtattaactcaatgaaatcacaagctaaccccaagaatagtactacttatatttccatgttataaatgagggaacaggcactgaaagcttaaatacttggctcaaggtcacagctactcaatggtgaagccaggatgagaatcttgattctgatttttaggcatctagccccgtactaaatgtcttctagcagcacagaaggaatgttaagacggcccagaaacagcagggatggctttacagaggaagaaattcttcagccaaaactaaagaaatgaatttgtcaggtgaaaaagctgggtaccattcagggagaccggcagatgtgcaaaagcgaaagacgtgagagaccttggcatattccagaaaccacaaaaagtggatatagttgcaagaagggaaaaggaagagatgaggggtagggaggggggtggcaaaggattgggccagatcatgccatgtgaagagttaagatttttaggttttcaagaactttgagtggaaatatgaaatagccagattttagctttagagaggtcacggtagcccttgaaactcagttctaatattgctgagtctttaggccttggggtcaatgatcctcattagttttaaaaatgtcatattagatacatattgtgatggattgaattgtgtcaccccaaaacatatttaaattcagtccccagcacctgtgaatatgaccttatttggaaataaggtctgtacagatgcgatcaagttaagatgaggtgactgtgatgggcctgaatccagtattatgactggagacctcagaagaatgggagaaaacagaaccccacaggtcatggcggaagcagagactggagtgattaggctgcaaggcaaggaacattaaggattgccggccaccaccagaagctagggagaggcaagaacagactgtacccgagcttcagagaaagcgtgggcctgctttcgccttgctttttgacttccagcccacagagctgtgagagaataaatttctgttgttttacgctacctaatttgtggtattttgtcatggcagttctaggaaacatattaaccttaaagtttagaattgtgttcactatcaattaataccttggagacgtgctgtgtgctaaatagcataagagaataaaagttagttattacacgtaagaatgtaaattattcacccagccctcccggtactatggtattataccttgtttggttctatcactgcagtttcagtccaacgagagcagtaggcatctgaaaaatggacaagttcctacccttagcttatttcactttaaacaccaagttattgattagaaatggaaaaaaaaatcacaagttaatttgctatgctttccattgtaaaccaaaagtaaatattatttgcccactattaaacttgtacagcagaatgatttatttgtagctcattgcctagcttcaaatattattgcttaattattccgattttttttgtcttgtttttaggtttaggttccacttaagttaggtgagttaagttaggtggatttctaagttaaaccaaggcttaacttagaaaccaagagagtttcctggttatgacaagaatgactttcaggcacagagtggatgacttggatgtgatcacttaaggcagaagacaggctctgaagcaaaagtgattgggaaaaaaaaaaagcatgactggggcttatataatgcttgctggcaatgtatgcaaaccatttgaaagagcatggcactacctaccacacaaatttataatgtataagattcttgaaattggaaactggcattttggattgctaatctaagcctatgagaagttattattattattattattattattattattattatttttgtgagacagagtcttgctctgtttccaggctggagtgcagtggcgcgatcttggctccctgcaacctctgacttcctggttcaagtgattctcctgcctagcctctcgagtagctgggattacaggcacttgccaccatgcccagctaatttttgtagttttagtaaagacagggtttcaccatgttggccaggatggtctcgatctcctgacctcgtgatccatccacctcggcctcccaaagtgctgggattacaggcatgagccactgcacccggctgagaagttattttttaagcagttttctttctttctttctttctttcttttttttgagatggagtctcactctctcacccatgctggagtgcagtggcatgatcttggctcactgcaatctctgcctcccgggttcaagcaattctcctgtttcagcctcctgagtagctgggactacaggtccccgccaccacgcctggctaatttttgtatttttagtagagacggggttccaccatattggtcagcctggtcttgaattcctgacctcaggtgatctgcccacctctgcctcccaaagtgctgggattacagccgtgagccactgcgctcggcctcatttttcttttatgcaaactatatggactacttgtttttattctctctagtcagctcattttatttatggattaatttccatttcaggttggggccatggtttactcttccatctgacctattagttatcaatatcctcagttaatagtctcattctacccacattttcaataaaaagtttactagctgggaagatttgatacacacacatgattttttttttcttttcttttctttttttttttgagacagggtatcagtctgtcacccaggctgcagtgcagtggtgtgatcacagctcactacagcctccacctcctgggctcaagtgatcgtcctatctcagccttcagagtagatgggactacaggcacacaccaccatgccccgctaatttttgtattttttgtggagatagagttttgtcatgttgtgcaggctggtctcaaactcttggcctcaagcaatacacccaccgcagcctcccaaagtgctgagattacaggcatgagcaaccacacctggccgatacatacctatattaaacattagtatgttcatgttagaataatgtaccttttgaatttcataaacttggagaatatttatattgatgatggatgaaagaactttcttggatggatgaagagagtaacgctgtgaaacaaccagcaggtggcgaaaactggcaatcaaaagctttttgtttggtggcctggggaatgaagacggaaagaaaacacaggccattcagactcttgatacaatctccattccctgcatcttgttttttttctcttcctggtgccacgctacttgtagaatccaaccaggtaaagctgccaaaagggtcatccattggctcttacaagtagaaaacatcttggaaagtgaaaagtccactgtgcatatgtttgtaaggttgttggaaggtctcaggcatagatctaggattcaaatccagttactcctgcctcaggctggtgttccctcccccacctcagcattgcccaaagacgagtagtcaatgtcacatacttcctgggaatacttgcccttatgctttaaaatggaatctaataaacatggaatctgaacgcaggaatggtttcactctttcatttgaaagagtatctagaacattcccagggaaaatataacccctagccaaagactgcaatacagacctgtctcaagactgattatagccaagatgccacataaggaatcagtctgggaaaatccatagagtgaggctctgtgggagcaaaggaagacgaaaatcagtcagcttttctttctctggaagtaggggatccgtttccttctggctgccccctttgcagaagtacagtttcttttgcaggtttgtcctatcatttcctcactcatatgctgagtattaggagcttgaagcctttcaattcctcttaggtaattttggggctttaaaatacgctttcaagatttctaaaccatactgttgtgcaattggtatgaatttatgtgagaacatttattctaggtcaatctatacccagtgtctatccagaccaaaacacctcccacgcgcataaaagggactctgtcccaaccatcagaagggcaagaaggaggatctcctttcatcccctcttgcctggataagaaatttgtacccaggcccccattcctatgtgagagaagttggcttgttgggctgatgggatacaataaatgaagaaataaaataaaaacacccaagagagatggcagtgcgtatagtcccagctattcatgaggctgaggtgggagaatccttcgagcccagaagttcgagtccagcctgggcaacatagcaaaagccatctcttaaaaaaaaaaaaaaaaggccaactaagtaaaaattaaaaaaatcataatttggtgtgcttttctggctttttaaagaatgttttgattttagagtaggaatgagacaaaataaagatgtcaggcagggcacagtggctcatgtctgtaatcccagcactttgggaggctgaggcaggcggataacgaggtcaggagttcgagaccagcctggccagtatggcgaaaccccgtctctactaaaaatacaaaaattagcagagcgtagtggcgtgcacgtgtaatcccagctactcaggaggctgaggcagaattgcttgagcctgggaggcagaggttgcagtgagctgagatcgcaccactgcacaccagcctccaagatacaacagagcaagactctgtctcaaaaaaaaaaaaaaagtcatagcatatttgtacacattgtagtactcatttgtcatctttcttgaccccaataatccagtgtccctatatatttgcactcgagccctattaagtaagccgctgtgcttctagaagacctttttcttttcttggtgctttgtcaaagactcttggagataaaaatacacacgtgcaacttgtttgtcctcttgtccttttttgctaggggctattcatgctgattaatttaaaactgtctgcttgcgcgtacacacgtctgcgagtgtgaatgtgtatgtgtgtatctatgtacctcatttgagaaagtgcggccaactaggattggctacgaggcaaaggtggagacctttaggagcccacccaccccagcgttaggacggtgggcctgaaagttactatatggaagtcctcatcgtgtagcactaaaccagtgtaaaaggtgttagggacagagggaaaacattgacttaaactgtcgtaaagcccttgataaaccccttccctggagcgctgagttctgcatggcctgggccacggactaggtgttcaggtggacacgggcggggatgcgcgtgcgtgtgtagtgcgcggacacctaggaagctacttgaaagtaaacaccacgctcggggcgtccctagacattgcttaaaacgtgcagagtcacctgtcttcacagcagggcagcgctgaggtcccactgctgggggcggtggggggcggcattggcctgggtcttcccccggcggccgagcgccggtaacacaacgtgtgtgtgtgtaggcgcgtgtacacactctcatacacggctagaaagggtccaggcgacacacacactcccacatacacggctagaaaaggtccaggcgagacacacacacacacacacacacacacacacactccacacacactcacacggccagaaagggtccaggcggttcccggcgcttttccagcccttgttttcatggcgcaccctcccgccagccgcccccctccgcactccgtcgtccgcccggcccggccgcgtgcggttccccgggagcccccaccccgtcgcggaccccagcgaccaccaagtccgcacgcggcctgccgcaggcctgagcagaaggccccgcgcacacccaccgcgccgcggccgcgcgggaggcctgtgccgcccgcgccacccactggccgggccccgcgggcgcagcggagcgggcgggtggccggcccggacgcgccctccccggccgcggccccgcgcgccatgtgcccccggcgggacgcgccactcccgggcctgccgcggcgcctttaacccgggccagggagcggggcggagggggcggtcgggtggctcagaggagggctctttctttcttctttttttgaatgaaccgtgtgacgttacgcacaggaaaccggtcgggctgtgcagagaatgaagtaagaggacaggcaccacagccccgctcccgcccccttcctcccgcgcccgcccctccgcgccgcctgcccgcccgcccgccgcgctcccgcccgccgctctccgtggccccgccgcgctgccgccgccgccgctgccagcgaaggtgccggggctccgggccctccctgccggcggccgtcagcgctcggagcgggctgcgcggcgggagctccgggaggcggccgtagccagcgccgccgcgcaggaccaggaggaggagaaagggtgcgcagcccggaggcggggtgcgccggtggggtgcagcggaagagggggtccaggggggagaacttcgtagcagtcatcctttttaggaaaagagggaaaaaataaaaccctcccccaccacctccttctccccacccctcgccgcaccacacacagcgcgggcttctagcgctcggcaccggcgggccaggcgcgtcctgccttcatttatccagcagcttttcggaaaatgcatttgctgttcggagtttaatcagaagaggattcctgcctccgtccccggctccttcatcgtcccctctcccctgtctctctcctggggaggcgtgaagcggtcccgtggatagagattcatgcctgtgcccgcgcgtgtgtgcgcgcgtgtaaattgccgagaaggggaaaacatcacaggacttctgcgaataccggactgaaaattgtaattcatctgccgccgccgctgccttttttttttctcgagctcttgagatctccggttgggattcctgcggattgacatttctgtgaagcagaagtctgggaatcgatctggaaatcctcctaatttttactccctctccccgcgactcctgattcattgggaagtttcaaatcagctataactggagagtgctgaagattgatgggatcgttgccttatgcatttgttttggttttacaaaaaggaaacttgacagaggatcatgctgtacttaaaaaatacaagtaagttctctgcacaggaaattggtttaatgtaactttcaatggaaacctttgagattttttacttaaagtgcattcgagtaaatttaatttccaggcagcttaatacattctttttagccgtgttacttgtagtgtgtatgccctgctttcactcagtgtgtacagggaaacgcacctgattttttacttattagtttgttttttctttaacctttcagcatcacagaggaagtagactgatattaacaatacttactaataataacgtgcctcatgaaataaagatccgaaaggaattggaataaaaatttcctgcatctcatgccaagggggaaacaccagaatcaagtgttccgcgtgattgaagacaccccctcgtccaagaatgcaaagcacatccaataaaatagctggattataactcctcttctttctctgggggccgtggggtgggagctggggcgagaggtgccgttggcccccgttgcttttcctctgggaaggatggcgcacgctgggagaacagggtacgataaccgggagatagtgatgaagtacatccattataagctgtcgcagaggggctacgagtgggatgcgggagatgtgggcgccgcgcccccgggggccgcccccgcaccgggcatcttctcctcccagcccgggcacacgccccatccagccgcatcccgggacccggtcgccaggacctcgccgctgcagaccccggctgcccccggcgccgccgcggggcctgcgctcagcccggtgccacctgtggtccacctgaccctccgccaggccggcgacgacttctcccgccgctaccgccgcgacttcgccgagatgtccagccagctgcacctgacgcccttcaccgcgcggggacgctttgccacggtggtggaggagctcttcagggacggggtgaactgggggaggattgtggccttctttgagttcggtggggtcatgtgtgtggagagcgtcaaccgggagatgtcgcccctggtggacaacatcgccctgtggatgactgagtacctgaaccggcacctgcacacctggatccaggataacggaggctgggtaggtgcacttggtgatgtgagtctgggctgaggccacaggtccgagatgcgggggttggagtgcgggtgggctcctggggcaatgggaggctgtggagccggcgaaataaaatcagagttgttgcttcccggcgtccctacctcctcctctggacaaagcgttcactcccaacctgaccgataacgcctgccatctaaaagtctttaacttgcttgctagtcgtggagatccaaagatctagcgtttgtaatccagtaggatgtggtggtaaatggtaccccttcagtgtttctcaagctgaaggtccaggagtccccaggaccaccgtttcctggcttgagcagcttgttggaaccggagggaggtttcagggactgcttatgaaccagataccaggttgggtcttgacagtctgcatcccaaacaagctcccctgaaacaagcccgttgtacactaaaattggagaacaacccgattagaagaatagactccacagaagaccaagggcatcatcaatcggtaaaattttccaaaagaggaaaaccaatgtaagtctttttccctgaaaaacttagttgtgtttgtaaagagctaagttgacattccaaagtccttggactggaatctccagtgtgtgccatgttcccagtgggcgtgatgaggtgtcctgaggagtatcaggctatggctttgctaccttgtcagtgacagaatttgcatcggctgcattctttgtattctataatttgtgtatggtttaccagtttgctagaatgttagaatcttttgtttttcaccactcagagtggacctaattttgtggtcggctgaaaaaaatttgcatctaggtatctatgtaaagtgtagaagaattgattcttagctgtggattatcttacccttactttagttgaagtgattgatacctgtggctttgaagaacatttgtgagatgatctttttctcgtactgtgctagatagagctttcatcattataccatacaattgtacttttctgagattctttgttggagggggtttagttcctaagagtcaaggattgtaatggagatctatatctcatatctaaaatgatgaatttatgaaaaagtaattcttgtgtgaagttttttttttttttacactttttgttttaatctgaagagttatctttgaaaaacaggatgcaattcagtgcttccttttatagcctcttgggagaatgactaatgtcattattttataggacctaacaggagcaaaaagcctagaaattactgcaagtggattagatgtcaagaagcacaccacatgtttttattacattttacaaagtgtgctcatactaggaggccaaatagagaaaaggccaagaaaagtagatgattgatgtgaacatctgatcttatttgaccaaagttgacaaaatattgatgccactgtttggtgtttaaaagtaagattaactaaaatgccccaatttaaatttctaaaatttaaatcctcttcttgaattgtttgtttgttgagatctcacattatcagatctttagtaattctggaagaatttgctaaagggtgaaaagaatatttttgttaaatatttggttaagtaggtggtttgatttttaatcactataactaaaggggttgggacttccagattcccaaaggatccttttaaaccaaagtaaaactgatttaatagttttactatttcacatttttgtgaaaaattcacacttacaaattttctttctacttgaaataaatccaaggtggtaactggtatctgtctatcaaataagttaataaaaatgtgggaaacagagacacatgtttatgacagaaattaagatacaaccttgatatttgttgctgaatttcagtgtgttaccctctcatgtaactgaagtttctttttaagtaaaggctcacttttttctttttgtgaaacagagttttcatagtagacctatctttgtggtcaacaggtatctgaggttgataaatgtagaggctacattttatgatgccaaaccacaatgacataccatagaacatgataaaaattttttgacaaaactgcttctagtaaaaataaatcatgtagaagcacagatggttgatggtaaaatatgtaatagctttcagaacaatgcatagatggtgactatataggaaaacaaaggaatttagagaaaaaatatatatatataccaggaaatgcactcataggacactttggaataaaagtggtagtgtttgagaatgatgaatgatttgcctatcatttcaaatgtgcattattaatctaaaagtcattttaggcatttggcatacagacagattttcttcacatttacaccaattggggttacatctctaataatatgttgtattttatagtgtaaggtagtcttaatggtaaagcttcagaagagagctagcatattttcttggcatgtgacaataatctgcactgtccccagggctccgtggattagcccatctcctgaatactacactgaatactccaggctttagactgcaagtcatttctttttctttgctgctgctcgtagaaaattggaaccttgtgaggctgaggaaatctgtttgacttttgtgttccataacatggataaatcaggtccttggaatgatcagcctctgatagattgtcccagaagactacaaattaaataaagactaaagaagtaattggctgtagagtggagtgtggatttattcctaggtctgaataaggcattgtgtggcatccagagagaggcaggacagaggaagcagtgagagagaagcaattctagaaaatgtggataccttgctgctcagtgtggcttatagacagtagcacatgcatcccccggagctttgtagagatgctaaagctcagctcccaccccagagctactgagtcagaatatgtggtttgtgtgcacgttaaagttagcgatgctggctaccatccttggttcctggtggcatcttttaggaagagttgctacctgggatggattctgcattgtccccttccagtggccttaaagatctatagtgttacttggaataccgagtatttcccaggtgtccactattgtgatctgactttaggaagacataaattggatgaaggagagatagcaagcaggtagatcaactataagcccagtcttctcatgaatatttttcgtagtagttatatagtttatattggcatcactggtcccattaaaaagtaagatagcttttcttcaattaaaggcaagagaattagctcttttaatagctctgttagttattattttatcccctcataacacagtttaaattctgtaaatgactttagtgaccttgcagcttctttaagacaaagggactcttgcaggcaagggattgagttttgggcaggtgatggagagtgaccctctaaactgggaactgtgacgacattcagcttcatgtcttaggagagagtgagataggagccactagaagaatgagatgattcagacaagagattgtaggagattggctttattctgttgacaagatggtaatccgacttattttttggttttttggtgttggtggtttaggaagacaggaacttctccacacccggtagagttcagctgccttttcattagtcagcaagcagtttttcctttctcaaggcagtccacatccagcaaaacatttgattaactggaaagcaataccattctcatgccagtgtacaaattacatgaaagagcatcatttttctagtgtctgaggattggctgcttatggccaattttggcagcaagacgataggattaaaaatagcttgaagatgatctagtcttaaataatatatttcatgatgaactttccttgggaaagtgcatctttctgcctacaagaatcacatgacccctttcaataatttatgtagtagagaaaaacacactatttctcatagagttttcagtcatgtgctgtggtgtgattgtttctggacattcataaaattttatagttaactgaattctcttttctgttttgttgctatttaacgtccattgaaaacatggctttcttttgcgcattctgttactttcagctgtactttctaataagaatggattgccctttttagcaatctttgattgaactggtacatttcagattacttaaatgtcatcaggccacacagcataccaggtaacagaaagccataaattaaaaataaaaaaaaggcaagcaaaattcttgttgttttttcttatctctgttcccagtcctattgcgctatttggagggatgatacgcccactcatgagcgagtgtgtgggtgctgcatgttaacagtggttcttcccacccaacatacctccgcacccttttctaaggtcactcattgtgtcttagcagtagtttagcaaagcagtatctcagcagaagtgcatttgtgctagaaaacaacactgtctttgtagtgtacaagtagaacgttttctttttcccccagagatatattgtatttgagattcaaaggttctgttcaacctttttaaggtaatctaatatcaccttattcaggtataacagtaacttgtcaatctggtcatcctttctgtcaaccacatgtaggagaccactcagtgaatttactccactgtgaattttctctttcatccctcttggtttggcttaatcaaccttaatgtttgatgtctaagcaggattaatgatgaaaatcatccaaggactgacagttattccacagatgtgattgccagtcttacatgagtcctgccttgggttaggttggaggcacggcaaggagagctttgcttctgccctggataaactcacaggctagtgttgcaggcatcttaataaactcgtagttatcatacagcctgataagcatgatcctagactcagagacttagaggaaaaaagcaaataactataagttattttgcatgtacttcagccttggtctaagaacgttatttctgaccatatggctgttcatgtgtgcattaggcctaatttaaacagggccaaaatgtagatactttaaaaaatactgtgtaacgtagacatatgcttaagagaactgaaaggcagggggagttcccttgttaaatattaacccactaagcactatttatgcatactaagaagacttaataaacaccagtctacaatttctaaagcatttcattaattctttttaagtaaaagacaatcaaggctccgattagactgactggaacagggtaatttgaagaactatctttcttaaataactcttgtatgccaaaaaatacaagtaggttttgaaccagagcgggggctcttcctttgagcaggggaaaaaaaagcttctgttttgttttggtttgaggttatattactgttctatttatcaagacacttctacgatgctagttacagaaattcacagtccattgtaacactggcatttgccttcggacttttttgggcttgtggtctgttcgtttaaatggagactgtaaaactttcaaaatgccaacaaagctgttttcacttaaaaacatatttttatagattgtcacttgttgttcttatatatgcccaattctgtatatgctatagcactatttctctgccctccatttgccagacaaaagatacacccatctgtccttcagtgtgaataaggattgaatgattattcctctctcttccaagccatgggactttctcataggtgccaccacccctgtgaccatcccctacctgccttatcattccaccggtgagggacctctcaggtgtagctccttgttaacttccaattagtgatgggtaggatttacctgaagaaaaccgtaatgcgcttagatactagcaaaagggagcagaagtggggagtctaatcaaagtgagaggataaccctcaccccaaacttgctgcaggcagctgggcaggtcaaaattctgtgaccagacactatccttttcctctagtgattataaactttaacctgtgcagagaaaagatagtatctgctggcaaaatttgtacttactttgattcctctagtgcaagattatagtggggttatacctgagacttcaataaatgtttgactaactaaactaaaatagcttagggtaaggactacttccccaaacgcccttttaaacatgtgagaaagggaatctccctgacatactggtatggccatttgtagcaatatactgagagtgacttgggtgattttctggggcgatcaaccacattccatgagcaggttaactgtggaagacacctgcccttgagcatcgcgtttgggccacatgcgtcaatggggaaatttgtgtttccattctgcttcttgttttgccttcacaacttcagggatagaagcgtattccatttttagttaataatcagctctctggggcttccatgtaatgagtcagaaactgatgactgactccactctgctcattatcatgtctcccaaaaacaacccgagaacccactgtgtcaagtgaagctttaatttttcaggggaggttttctccattgagaccaatacatcttttcttgtgacagatccagttaccatatttccttatttttaactgtcgaaaagacagttaagctgcaacagagtatggtgagtttaccaattttaatacttgaagcaccaaacaaaggatcagtgttgcaggctgtctcttcttgactttttccagctctccttagcagataaccaggatgatattttttctgctttacaacatgatgaatgctatatctctatattaactctgaaattgaattgcagccaaatattcctctcagctgcattagaattttctaaaagaacatgagacacataaacttagtcttcttagttcaatgctatatctcagatatattgatatctgatttacaattaaaataggaataaaattaagtacaaattatatcatcagctttaaatattgatttatcttcttgaaaaaaaaaaagcgagtccataaaggatggcagcattggcatttctggatgtaaaatttcagggctatctcctagccatatcctttatggattcctgccagcatctttaaaaacacacacactgaagacacacagagaggttttgaggtattttataacaaaattataagaacagggagacaaagccacttactaaacattaaagtgatagtataagaagaaaatgatttgaagaagtcctaattgagggaaatgagcaattgtccacaaaacttaaccctgggttcccaggaaccggggtagtgatggtcatggagaggggttttagaatctggttatttaggaaaacatgcacactaacttgtttcattgaaaaaaacatttattgaggccctacaccatgcaaagctctatgctaggtgttttagttaagcgaaaaaatgtctaagataacttttgccttcaaggaacttaccaatcagtaggagaccaagacaaggatacaaatcactgtaatcctggacaatgtgtagtagacagagaggcccaacccagctacagtggtatctgaagagtttcatgccggagataatgttgagacaagttttagagaacaggcaggcgatacggggagagggtctttcaggtagtggaaactggaggcgtcaaagcaggcatgaatgcgggaggtgtgtttggggaattgtggagagtctgatttgactggggcatggagaactctcctgagataaatccatagttttgagaacttaccactgcatactaagttgtgaaacttgtatagacagccctccctatctttgggttccacatccatggattcaaccaactttggatcaaaaatatatggggtagggcaggcacagtggcttaggcctgtaatcccagcactgtgggagctcaaggtgggtggatcacttgaagtcaggagttcaagtccagcctggccaacatggtgaaaccctttctctactaaaaatagaaaaattagccaggtgtggtggtgggcgcctgtaatcccagctactcgggaggctgaggcaggagaattgcttgaacccaggaggcggaggttgcagtgagccgagatcgtgtcactgcactccagcctaggggacagagcgagactctgtctcaaaaaataaataaataaacaaacaaataaataaaataaagtatataggaggatgtgcatatgcaagtactactcatttaatatcagggacttgagcatcttcagattttggtatccactgggggttcctagagccaatcccctgaggttactgaaggatggctgcgtttaactgtaccagggatgttgaaaggatgttgcaaaggttctcagacaaggcaggatgtgtgcgtgggaggaagattgacagtgactgagcctggacgggggagaccaggtatgaggtctgaagcacctggaacagaaaggacaggacagatgtgggcacactgcacgtgtagaatcaaaggactgacagcaggtcgaatgtgaggaatgagggagggaaagaatcaggactcaagtgccatcctggctgcctcaaaaaatgatactgtcttccagagggaaaggaaagataacaacagttactgctttgtggcgtacatgtgatgaatttcattttggacattccagtaggatatccaagtggaaatgcccagtaagccttagacataaggatctggatctcaagagaaaaattgaggttgaaccataatatgtctttcccctcgaatcatgtaggtttctcttttgccttctttcattgccctaagtggtcctaaatgctactgctgatgctgtcttagtttgcgactgttgtttgcaccccaccttttcccaaaggtaatctgtagacttgcatggattgggttaaggtggttaacctgcagctttgctgttcaaagcttggcttcccactaccagtttgccaacttaatgagtacttcaacttgagtcaaattagtattgttccaaatatcctaatagtatcctctatgtgtgactctaggtcttacaaaatcaaggtgtcctttctcattgagacttccttattaataaaatatttcttctattaaattcaacctggcaccaagcatagtaggtaataggcacacacaatgactgtttattgaatgaatgaataaaatgattatgttagggcattctgagcaattcatcctaagcagctaattttctcctacttcttttattatagtgtgtgtttgtgtgtgtgtgtgtgtgtgtctgaaatgtcccatcctacaggttcattaatatttaatagaaatgaaagaagaaaaatacctattaagtgttttgatttcatccttttcattgaattgaaaaagtatatcatttattcctgaagagaaatctagattttgctctatattaaacatttgacatttattggtccttaatgctaatatagataccagcctgctggttgtcacattctatctgtttatacgaaggttgtagacacacagtgtatgtacatatgcctagttgctctcattccttttgtttcacatctcaagcctaacccagactgaaaaggttttgaaggctgagattattcatcaccccatcattatagaaagcagggctggcccaaggttctcacagtgggagcaaggtggattttaactctgatcagtgttgtagctcaaatataaaaagaactgcagcacaaaagtcacaaggataaatgatcccctcgttcttctcccataaaaataagcagccaattgaaggtggaagtcagtacagtgcggcattcccagaggcgacagaacctaagattccatttctaaagacactgctcaacaagaagaccacctgggatgtcttacataaaaccattggcctggcagcttttggctgagttctctattctggttcaagccagcatcacagcctatctgtggttttaacaactgatggaatttgtattttgagaaccctcatccgttagcatgaagcaaactcaaagcattgttgctcatcagttgtcatctgtttgagaaagattttgatttgtttacttgtagtgaagcttgaccatacttctccaggggctttttaaaaagatgaatgtgtcagcttgtagatttgtccccatgaatgaaaccacaagcaaattctcttctctcttccagcctcccttcctccctcttgtttcttcagtggccatctgtgcattatgttcccattgccaggccctcttcaagcagcttatctatgagtgaattcagaaacttcaaattataaaggacacccagataattggcctgttctccaaagtatctgtcccctgtgctgctgccagattccttcttaatgaatacatccagtgacagtgggattcttgagcttgtccgtatctgtgagaaaatgagctctcctgctttgtaacagcttgtggctcagggaaaaaaatgacagccattgcacaagtttcctttgaatgtagttttctttcccataaatgatactttgagaatacagttaaggggttattagttttctatttcatgcttggcctgtgtgtgagaataacacaagctgtcactgcaaatcagtagctaaaaatgctttgtctggttaatgtgaacatttaatatttggctcaattaaaaattaaccgatgaaagtacatgtcattggaatttgaaaataccttttgtacggaatacttaaagggcatcacccatgactaaaccagtgcttttaaaatatggagaatatggggaaatttaatatgagttgggatacttgactcttttttaaaacctctctacctgtttggcacaacagggtattgataaagagtgggctcattgttatggcaaaggattcacttgcatctctgtgtttttaagtgggtaattgtttttttgcactcagtcacatgattaaagcagacagaacaagagatcagttattcatttataccatacttttaaaaaaatattgagccaggccctggggaagtgggaagtgagagccagagcggcgtggctgatagtctagggcagtgctatccaatcttttggcttccctgggccacattggaagaagaagaattgtcttgggccacacgtaaaatacgctaacacgaatgatagctgatgagctaaaaaaaaaaaaaaagcacaaaaaaacctcataatattttaagaaagtttacaaatgtgtgttgggctgtattcaaagcctgccatggattggacaagcttggtctgggggagtgaagaccattcaacatcagctgcaggagagcatgtttaaagctatgagaagagatgcagcaatagtggtggcatttattggagtcaaggaagtcttcccaggaaggggactgaagcctgaaggatgagcaggaatcaatgtagtgaagtgggtgggaggaaccaagtgtggccccaggcagaacttcaggaacaaaggccagaggcaagcggccacatggtggactgcaggagctgaggagttcagcctggctggagtggagagtgcaagtgggtgggtcagaaagatgatgctagaggtggcccaccctggaagagtttgtttcagatacgtcaccctgactccactccagaccgttaatgagacgggggagaaatcagtgaccagatagaaggctctttcagcaaacgggcaagagatcaagtgcctgacctagaggaatggtagtgggaacggcaagaaattgctagctttgcacaatgattaggactagagtggagagattttttggaagaggtaatgattgactgaatgctttagaacatggctcagttcttcctcagctttgctggtctttctgtacaacttggaaagaatgtggtcattgttctggttatatataaatgcttttttgtgttttttgtttgtttgtttatttgtttgtttttggagataaggtcttgctctgttgcccaggctggagtgcagtggcaccatatcggttcactgctgcctcgaactccggggctcaagtgatcctcccacctcagtctcctgagtagctgggactacaggtgcatgccaccacacctagataatgtctgtcttatctttttttgcgacaggatctcactttgttgcccaggctggtcacaaactcctggcttcaagcaatcctcctgcctccgcctcccaaagtactgggattacaggcatgggtcacctcacctgaccttatacaaatatatattttttcttatttcacttttaaaaaattgtctggttaaaaactatttttgttagaattcaccgtgtgataaatctttattaactatcagttaataaaagtatatttgaggaaagaattcaattatgaaaggcagttttcatagaatttttttccgggtgaaaaaaatgacagtggtttcttgcctttacgtaggattttaaagtttctaaaaaaaaattccatatctgttggcccatttgatcttcacaacaaccctaagcaaggcagatattgtattccaacttctccctactttcctccccacacacactgttagttatttgtttatgcccatgtaaagaagaaagttcgcccaacaaaggtgtgtacgagccaataagcacaggaagagctgatattcattccctgggttgggaatcccgtagatatttctttatcctgtgctgcttctctggatatgtgttcataaagacacaagattgcttagtagagactgaaatatattgcattttgaaaactagtatactctactgctttctgtgtcaaaaatgttcagggaaattggaatgcagtcttttgtttctggttactttcccttcttcgattcagcctttgcagcgtttctcatgcttgcagcagagggggatctagctgcttccatttggtgcctaccatcagctcaagaccctgtgaggatgcgcttatgagccaggcgggcttggacatgagctgaagggacagtagtaggattgacgtgcgaggtctctaacacttgaaggccctgtaaaacagcccctttcaacaggggccaattggaattagatgaacatgtgtgactgtttttgcttgttgacacctgactagcaacggtgttatgttagcatgctgtttgctgcctttatttctttgaattcctcagagtccttatttattattttcaaaggttgtaattagctttaatcggaagtgcccgtaagtgtagtcctgtaaatgttgctcttccatctttcttttttcttttcccaagaaaatgccgcattggaccatcaggaaaaataactaatgggtactaggcttgatacgtgggtggatgaaataatctgtataacaacatccaacaagtttacctatgtgacaaacctgtacatgtgcccctgaacttaaaagtttaaaaaatttaaaaaggatgtgaaacaaaaaaattaaaagaacaaacactaataaatatgaagaagtccttcagagtctttaaatttgctcatagagcattgactgagacactatctcctttagtaactaaataaaattaaaaaaataacactgggctcctctttttaggtgaccaaaaatatttggtacatgttttttgaatgttgaaaatggtggagccttcatcagtagggtttccgcagtagtaaagggcatgttactgcaagttcattcaatcaacaaatatttataaatatttgtttactgtaaagagcctactctgggccaatcattgttctaggggctggagctataacagaaaacatgacaggttaagaactctcccatctcttgtgaatcccacattgtgaggaagtcagaaaagtaaacaacttaaaaattaacaatataacataagggccacaaagtaatgaaaacagggcaatgcagtgcaagggtgctgatgggacaatattaacttcttccttggtctttgagatttttcaagcagtactacaagtttacacagaggagatttaatgggtttttcttcattaatagttgaaaacagtgttgtaccttaaaaataataaatgtattagtataatatagcccttacatcagtttaaaatgagttaccatgaacaatatgaacttaaagagacttttactatttttggctaaaatgtttagcgcaatcttttccttacctactcatccttctcatttccccatttccatttatgacaacattggtcattggcctcagtcaccgaaagtcaggaggaaggaaggaaatgaatatttattgaaccccaatatgtgccagaccctggatttaacacttttagggataggagattatttaacctcaataacctctccctgagggcaggaagtggatttatagatgcggaaacagaggttctgcaaagtcaattgactttgcctggtaagaggcaaaaccagcatcctttatttaggcaatccaagtgatgttcatgtcctctggaacttaaatttttaaaacaaaaatttaaacagaaacatattacaaaagaacaactttatgcatgtgaccttttgggttctttaggaagccagttagtcatctttattttaataactagaaggtgaaatctttcctacaacatgtaattttaagttctctcatagttaaaaaataaatgaaacaactttttttttctgtctcccttttgactcctagagtctgtttaaatagcctttgaaaaataagtactaatcactggttcctaccaagaccagacacctgattcagaagctcttacaggggtcagagtgtgcgttggaaaaacaaacccacagtgccttcctggttccagagaaatgatctcactgtcaaattgtaacctgcctaataccttaataaaaaggtggggaaagtctgcggttttacctctggtatgatccttttcccttcactctttttattttaggcatgaccttagtgttttttttcttctagagtccagaggtggaatgacatgtcactcaggtttacaagatgaggatgtatctgtttttatattcagctgtacattttattctacttaaaaacaaacccaccttcagcaaccagggcgtatcaagggagagttatttccatccccctcagtttaatttggatacatttggcccagaacagcacagtgtttccataataacatttgaacaggatgcccttgtgttatttgcagggctaagggagtttcagcatgggccaggaaactactttcttaaaagaaacttaaacgcgaaattctgacaagataggaaactcttactgcatccttactaaacctctttttcccccctactttctcatttatttatatatctcttgtgttatgaaacatatataggttgaatatttaactcactctgaattcatgtgcagaataagtcactcttcagaaggacaaaaataatgttttaagtggtttgtttaataaagcacatattaaaaaatttcaattcaacatcttccctgggcacaacatgttatgactttttagagtagagcttcgtggtatttcataaggaagccaaaaaggaagggaaattattattcgggcagagggacaatagtgacctttcattaagcaagacagagttcaccatcaggctccccaaaccccaggctctgtgttagttgaactgaacaagccaccaactatttcctctctctctttctctctttctctctcttttttttttttttgagaaggagttttgctcttgttgcccaggctggagtgcagtggtgcagtcccggctcactgcaacctcagcctcccgagtagctgggattacaggcgcctgccagcacgcctagctcatttttttgtattttttttagtagagactggttttcatcatgttggccaggctggtctcgaactcctgacctcagatgatccacctgcctcggcctccctcccaaagtgctgggattacaggcgtgagccaccacacctggcctcctctcttttatagaccagactactttaaaaatattcgtccaatattacctaaaatatttcatttataagacataacccaacattgtaatatttaaaagactgcattatgtagtttttacatatccttaagatcctaatgaattcagataatcagtatttttgttcttttaacagctttacatgtgacctcttagttctagagtttgatctcaggagaagggaagagtagatttggattctgtgccgtggacaggcgcactggtttcccgtgtgaaaaggacaaagccccgccccttctggagctcagttctctttgggattattcataatgttctccaagaagctcggagtgcctgtttgtcgccagtactgtaatttgtgagtaaaagatctttatgattgcaaaatacattagcgccttcggagatcattgtttcttgatgacggtgtgaatcacaactaggaactaggaagtcatttcagccccttctgtgcagagggatgtcatgaagtacatatgctaaagttcatacccattgctcataagagctcagccaaccttctcaaccagttcatgtaaaaatatatctgtataaatatgcatacgtatgtatgtatgtggtgtgtgtgtgagttaagatatacataaaatttacgttttccaccaattttaaatgtatagttcagtggctttcagcacatttactttgttacataaaccattattatgtaagccattactgacatctgtttccagaacttgttcatcattccaaatggaaactctacccattaaactataactccctgtttctttttctccccagtcctaggtagccactattctattttctgtctctataaatttgactcttcgaggaagaatttgattcttcccataagtggaatcagacaatatttgtccttttgtgtctagcttgttttatctaacatattttcagagttcacccatgtcatggcatgcatcagaatttcattcctttttaaggctgaataatattccataccatttgcttttttaaaagtccattttctcaaaaaattggttgtcatttccactccccacccagccaatagaaacagcaaatatattaaattagaattgacctgacagaggaggtaatggaggcctgtaaattattcaaagaattattttagagtctgacagcaaggaagaagacaaaaatgctcttaaaaccagctcaggagtctctgaggctcttctgcgtggggcaggcagtcacaaagatctctacggctcctggagttctcgctggatcgtagcacaggacaatcttagtgattcctaatgatgccactgagtcatcaagacagagttattttctgtaggaagagtcaaagagttcagggaaagtgagtagtaagttacagaaatatctccattccaaatggttaaaattttttaaaagtttaggcttcagtcatctgaaaaatttacttgtgtgaaatgattcagtccagactgtagtgaaagagaggaatcccagcaatatcaaagtaaaatacacacacacacacacacacacacacagagagagagagagaaggagcacaagatctctttcttttttgtttttttctctttttttttgaacaaactcttacatatccttcaagcccaggccaaatggcaccttctctgtgaatgtgtgtgtgttaaataggcagagagaccttcaggggcgtttgctgacttctttcattctttttcatctcctacctccctttctagagtagagaattagtaggaacttgactcaagtggacggggatgtaatttctagggggagtttttgctgtcttactgcatctaaattattctgtctgtgcataaattaagttgtacacatatttagaagagccacctcccccactgcaggatgcatagagtggtttttgtgaggagctgctttgcagcctcaactctgcctcctgacttcattttgaaaccactgtacaataaaacgtggtcatttgtttgttccacattctttgtgcctactgggtttctggacatgatctctggccttgggggggacagtctcctggggaaacagacacacaaacagatctattacagtccagtgagttttttcctgggaaagttaaggatggtttcacagagaaggtgccgtttggcctgggcttgaaggatacataagagtttgttcaaaaaaaaaaagaaaaagaaaaaaaaaaagcaagagatcttgctctctggagaatgtgaaagggtaccatatgcaaataagcagagtaattgaagggcctgccaagcttgggaatggcaaaaaggccagagtgaccagaagagaggcagttggggatggaatggaaggggatgaagcgggaagatagtggaggctcgctctccaaggctctatgtgccccactaaggagtttgattagacctttcctgcagtggaatgccagtaaaaggtttctagcaggatactaagtgacatggctggatttttttgttgatgaaaatactgctggtagcagtgtgttggtggcactgagggcagcaaggaggccagatgggaaggtggggtcaggtgcccaagtgaaggtgctgggcagctgccccaaggcatgggcagtaggaactcccaggatgggactacctgaaaaggtgttctaaggtagaatcaacaagattgtgcacagttgatcatcgctgaacactcagtgcttagcgcaaggcaagcacataatagatgctcagtaatattgactaaatgaatgaatgcacaggcagctgggtacacatgacaagcagtacaagcaagtgttaaagtgacaccccagctatactcacaacagtgataaagcagaggttcacatggcctgtactttgcccaactctttctaaacgttctatcactattcgtgtatttctttcttacaacagtactgggaggtggtggtgtttttatccttgtcttgcagatgagaacactgaggcttgcagagggggacccattacagctgtttgggtggctgggctggaatttgaacccaggcggttttggagtacttggagcccttaattctgttgctctgctgccgcccagcttttgagccttccaggaagctgctgctttcaaggccccagaagtgatgactcggggcaaacctaagtggtggcaggatgcagagaagcctgtttaggaaaccatttatctcacgtagacatgccatctgagatgaccttagtagaaataacaatggcaatgataacagctccgcagccttttccctggcataagaaactagttttgtaatgaaaatggaatttctctggggaatagtcctagaaagagataggtagttgagataaaaataacaaaatataaaatagcattgcattgttttctgtgtatttttccttccacctttgtccttctctgttgtgtaatttaccttgttcccttggccatgggtaggttgggcatcactgtgatttgacttttgtcctttgtcccaaagaaagggatgagtgtgtgcatttagaggtagctatttgcaccttgcctggagcttgccatcaacatagctagctaaaaggaggagaggcccttgagggtaaaccttgctttaggagtcgaagcccttggctttctggaatgaagggtggtgagtttggtttcccagatggcccatgggccagaatctgagctccttggcattcaggtgtgtgtgccgttctggatcattacaaccacgactgagctgtgttttcaagccataggtcagagtcgtgtaaaataaactcttgtcataacaaaggatgcggcagccagattgcagctcggagttccttcactcatttaccccagaggacactgattttcatgtcagcatagggaagagattccatttgtctgccgattctaattgggggtctgtcttgctcgaccaccctggtaaatggtgataaatactggtggccatagcagcacagagagagagtgccggcctggaaacccagccaagctctcttggctccaattttatgcaaatttgcctaatagaatgcaaatgatttcacaggaatacggatcccagggacacgtgctcatctgttttcagcagtgttcctgggcttttagaagcagccacttgagaggccaggcaagtccacagagaggcaggttaaaggtggcttgcgaaggaatggctcaccccatcagccgatgccacgcctggaatttcattatgagcagcggctttccctttggcagtctgcgagccaagacttctgtgttttgggaacaggaaaaggtcaacacagactaatgctttttcaaaaagtcctttattcttcctcttattctacagattttctgcgatcacagtatatatccaaacatttactcatcctacacatcttgattgggcatttagtcactaaaaggcactgtgctaggcactgagaaaaggctgctctgtgccaccaaggtgtgacaccataacattgtgtctaaaatctactcctgccctctccagtgccgtggctgtggctaccaggctcacgtaatgtggccaatctgaattgagatgcgattggagtgtaaaatacacaccaggtttactggatttcaaagatgtagtatgaataaatgaatgcaaaatattttatcaataatttttataagaattttgtgttgaagtgatagtattttggatgtattagtttaataaaatatactaaacgtgaccactaaaaatttaaaattacatatgtggttcccattatatttctttctttcttttttttttgagacagagtttcgctgtgtcgcccaggctggagtgcagtggcgtgatcttggctcactgcaacctccgcctccagggttcatgccattctcctgcctcagcctcccaagcagctgggactacaggcgcccgccaccatccccagctaaattttttgtatttttagtagagacagggtttcaccgtgttaaccaagatggtctcaatctcctgaactcgtggtccgcccgcctcggcctcccaaagtgctgggattacaggcgtgagccaccgtgcggggccggttcccattatatttctattggacagcactggtctagactgctaaccatttattgcacaatgtggtcacctttttattcccatagttggatattactatataggaggatagaaagacctttccttttttcttcaatgagctacagttgtgtagccctttttaaagttcattcatattcatgttcttgtggctcccattgtcagtctgctgagctgggcagggaaggcctcaccatacttttacaggtgagcatactgaagtgtaagaggtcactgttgccagcctgccctaagagttaagccaagaataaaacttcagtagtttctgggtggacgtggtggctcatgcctgtaatccccgcactgtgggagaccgaggctggaggatcacttgagcccaggtgttcaagactagcttgagcaacttagcaaaaccctgcctctacaaaacacaaaacaattaagccaatcatggtggcgtgtgcctgtagtttcagctgcttgggaggctgagatgggaggatcccttgaggctgagatgggaggttgaggctgcagtgagccatgattgtgccactccactccagcctggatgacagagtgagaccttgtctcaaaaaaaaggacttcagtagtttctaactcttgccaggctggaccattacagctgggttgggaaggttggaaatagaactttcgacttctattctagtgtctattaaaaatacactaaaatttatgcatggaaatatttacttttatttctgtaccaaagatgatagaacacagcccacttagaagtatttctgtgtgcatgtgtatgtaaatacacacaaacatgctctgcagctggctaataaaacacagtaatcaaagcctatagtggatattcagtgtaaaggtaagacttgctgaattttgaggcccattggggaagggcagggtcagggtgagacaagcatgtggtcacaaccagggggcgttttcttctgttgggagtcaactactgttagggaaaattcctggcagcgtggagcaaggttggtggatcccacctgtcagaaaatcctgagactgggtttagtccttgagggatggaaggacaaggcaggtaccctggaccaaagaggcaagggatccaacccaggtagtcacccagcattggggatggcttaggaaaaaggttggggaggtgcagttctaaggaagaagagagaattgatcaagaagaggaggtggatatgggtgagagctgtgtagttgttgaggacatttagggcaacgggccttgggttgtattcttctgacccgccaggcacttgctgtttgggcatgtcatatactcttctgagctttcatttcttcatctgcaaatggggaagttgagttacagggtccctcactaacattttgtgattctatgagtttcgaaggccagagaatcagcaagaattgtattaataagctatcaatgatggtataaaggttttgcttctcactgctgctctttctgctgtctgatgtgctgggggcactgaggtctatggcaaatgagatcattggcctggaccattcacttggcccttgacagacacaagttgggtctaggatttctttgcaactatagccaatacatacatattgtagtataatatctaaaaacatttatacctacttgtctttcttggttctctctgttctccttgtccctacactttctatgaattataataataataataattattactattattatctttttttgagatggagtctcgctctgtctcccaggctggaatgcagtggcacaatctcggctcactgcaacctctgcctcccaggttcaagcagttctctgccccagcctcctgagtagctgggactataggcactcgccaccatgcctggctaatttttttttttttttttggtattttcagtagagatgggggtttcaccgtcttggccaggctggtcttgacctcgtgatccacccaccttggcctcccaaagttctgggattacaggtgtaagccaccgaactcagccaaattataattatttcttatctcctatcttcagagtctagtgttacacagatagtaattctccaacattgctcatatgatttagtaaatcactgcatgttctcggtttagaaggattttccctgtcttataccttctatgaattaaaaagcttttggaccatggatgaatgacataagaatttaactacttttttttttcttttcttttgaggcggattctcactctgtcgcccaggctggagtgcagtggtgtgatcttggctcactgcaacctcagcctcccgggttcaagtgattctcctgcctcagcctcctgagtagctggaactacaggtgtgtgccaccacacccagctaattttttgtatttttagtagagacagggtttcaccatgttggtcaggctagtcttgaattcctgaccgcaaatgatctaccggcctcggcctcccaaagtgcagggattacaggtgtgagccaccctgcccagcctactttttctttttaaagaatttattttaattgggtttcgtaaatgcagggatacaaaagctattggatcttgagatagctttgtattttgtagagaatcatcccaggagcacattccctcactgagggttccagccacctcttccgcctcattatactttgcttagcaccgagaagtctggcatcgtttctgttggaatgaaaagattggcagagctgccctggacaacagcactgcaaaacactgtggcagaaggtttggtctacataccaaggcagccaaagtattaattgcattctctgtgatcacaaaataaggcgctgaattattctcttcatgttttaagaatgacaggcttttgctctgccagctccaagcatagtgcatcacatggaaaggagatgctagatttgcaaaaaaaaaaagagaaaaaaagcacaggagtgaagatctctggtagccagctgcttcctaaaaaagatttaaagctgaactgttgcatgagaggtacctataaaagatcaggagccgggtgaggaagtgtttccataaatttacatactctgttaaaacatgttctattttggaatcttactttagattttgaaatgggacttttcacgttgctggctatactttgatcccattttcctttgttttggtgtatttactggagaaaactggttatgatatttctatatgtacttgtctccccccagccccagaacaagcaccatatgtgagtattccagatatccaaggtcctctggacaccccagtctcttccacaaagctgcctcctcagagcctgctgtcccgtcttctaggaatgtacccatttgaaaacccacactcacactaccacaacacatacactgtttcttgctggtcgttcctttaatctcagtggaagatatctcatagagaactgttggtgattgcttaacttggttgggaggaaaatagatcaagcaggtgacaacctgcatattggggattttcctatgctgaaaattgttattctgttgcagcactccaccctcccttcacagccccaaaaaagagaagtacgagtgctgctgatgttcagggtttgaatatgttttggtttaagatgttcagtggaattagagagaatttcatcctgggcagtgcagtcaggctggaggagtattttggtttcatattactaaaccttgttttcccatcccagctgcttgtgtgctatcttggggccactgagaacctggctgggctctgcggggtgggagtgttgtcccggggctgagtccagccaggggtgaggtcgtcttggtgcacatcttgcacgttgcatgaagctcagagcccagcttggctcttgtgaacttcccctgtggggacacaccctccaaccaaagtgagggtccagcggccaccaggttgtgacatgagagccgtcgctattattactcatcacctgcagcagcaggaagggtgcccagaccacagaaatcttctgtctctgggcccgtgcctactgcagttggcagagagctcctgagctccttccctaatgcgtggtgggagagcgctttcttcagcactttcttcacagggtttcctgcagtgggagtcttcctgatgctctttacccccatacttatttcactcccagaatcaaggagaactgttaagccattcctcagtacgatgtgtcatggctgaagaaccattcattcaagacattggtgaagagggttctttcattgcctttcttcaacgacggtttatttgctgtccatttgctgagcacctgggtggtgccaacatgaacccatttccttctgtgcgcaagccccccctttctattaccagagtgcagatcccagctagcatggtacgtgtgagtgcgctgtataaagtctggaaccacaattagaaaggaaagcctttctaaaggtattttgtcttgatattcattaacctattagattgccattctttcatatctaagatgatcataacatgtctcatccaagctgagacacttgttattaatcattattctgggacaatagggtaggccaggatggtcccaggcaagctgatgtctagagtaataaccctgcacatatgaatcttttgaaggattgggcatgatttttttttttttttttttttgcactggggttggctggggctaggagtttgtgatgaatccttccagtatttttctgaaaaccagtgaactattttgtaggtttctgtgtcgttagaaacatgcaaacctatccactaaaaccactccagttgatctattaagtcattcgttaggtcttacctggactctcttcactgtcactatcatgatctgtccacatcactggccctttctcctatcacctagctctcctgtgagcccagcactgatataaagtggtttctagtcttcttggactctcaatttaacttgcttcccatgggaatcttctaactgtttccccaaaccaccttgtagacattcatttctttgtttaggattctaagaataggaaagagagacataagctagattccattcctgtttcagtaagattatctttccaacacaagaaaggaatacatctaaaaaattctttcagcattttttcccgctttattgagaaaaaaaaaaaaagaaatactcatgagtactccagggcctcggttgatagtgtgacaaaaatagttccaactaaactaagtaactcaaggctatttgctttatctttgtactctttcatgtgttcccgagtcttttacagattgggatggtacactttggtttaaattgcaaactcttgtatttaacttcctctgaatgattcaggacggggctgtggacctgttgacacttgatgagtattggtttctagtgcaaatgatgacctgttgaagggcatcaggcatatctgaaggtagctgtccaactaggtcacgttcccatcaacactgtattgtgaatctttggtaagaagagtgataactttttgcaaaatgtagtttttaaaaataaccgtgaacttcagtgtccccagtcaaaataataattcatttggggaacaatttagagattctttcgacaaatacagagaaatggaagccaatcatatgcgcctcaagcatttgatattggaagaaaatcagcatctactaagtaactcttgtgaaaaccttatccattttttgcttttttgcacttttcaatctgcagcataaattaggccacaggaaaaggatggcgtaccttcaaagagccagttgggttggctgtgttctttctattcgtggaaaacagctgtgggtgccgggtgttgaagtcaggcttttgttccatgctaaggtaggaaggtttgttcttgagacctatcactcttctgtggaggaggagttcacagatggtgagccgctttatcaccatctcggaggcttttgaaatatgttgataatgacctgggaaagagggccgagtgggatgagggtgggagtaggaaagaaacattcggcccacacagtgttcatatcttctcttgtttttgtatctgtggcaactgcagattaaatgaattaggttattcttttccattgccttctaccaaatagaagtacttatttaagccttgcagatttttttcctgctgagtgaagcctgaactgagcccatgaaaggtgatctctccaaagcaagggctcctgtttccttccttccatcctgctatctcattcaagtgaaattcctgccatggcatttatcctgagctttgtcacacaggattactgtgatggtccttactatgaatggagtgttaaggtgttttctttagctcgagataaaaaccagttttaggaatgaattctcttttgctgtgaaaaacatgttctaagggaacaaacctcgcctcatttccatttttacattgagcaaatggttgggaagttcctttaatactgtctgtcttgactcattgtctcactttttttttcctgattctcttgtgcgggacctttttcatccccacagcttccgtatcgtctgtatgcagctgattctcaaatgggtatttctgcaaattccagttctgcttatatactatttcctgatgaccctttctatctggacttcctgttggcagttcaaattaaacacataatcaaaatatttaatccaagactaaactcatcgtcatccctccaaaaccttccttggactcaacagtttctcttcctgctctcatcactattccgatcacccaggctcaaaacctagggtgcattcttccagcttctgctcaggtttttgagcccagcatccttcactgccctccattcctccctcactggtcttgctgccaccaccttcttaactcttccctaggggaattcattcacctgctccagtttctccgcactccagtttatcttatactttgtgatgatttaattaaaattcttccctgattgtttttcttcttgaggtggagtctcgctctgtcacccagctggagtacagtgggaccatcttggctcactgcaacctccgcctcccaggctcaagtgattctcctgcctcagcctttcaagtagctaggattacaggcatgcaccaccatgcctggctaatttttgtatttttagtagaggcggggtttcaccatgttggccaggctggtcttgaactcctgacctcaagtgatccacctgccttggcctcctcgagggctggggttataggcatgagccacccttttttttattttaaggctcctcttttcctaggtaagtcttcattttcctttatccagctgttcaaattcctctctccatctttcactgcaacctatgtgacattttcttcatcattccctgctactccttagcaagattgctatgctctgaacccgccctgccttctctgttctggggatctttttcctgctgtttttacatcccagagtattctgttcccatcagaattctccatcccttaaggcccagatctgatctcaccttcaggatgacagtatccctgttgggagtgaccccgctgatttctaaatctttaccaccttttcagcctttttctttttttttgtgccatttttccaggccttgtcacatgctctttgatattactttgatatacaaatgtttgctatacttttccttcttcctcttccaggttataaacatgttgaggcccggggctgttttctaagttgttattttaggcttgtgtatatccaccaccatgccttaaaaaaaggcctcacattagtaagagctcagtaacatttgctgaatggatgaatgaagtatggtggctttgctatctcttactttacttgttcacttctctcctagcttcattcattcattcattcaacaattacatattgagagcctattatgtgccaggcactgtgctacgcatgtaggtttatcagcaagcaaaacaagatccctgcctaaatgtgccagcattctagattcttccttagactcaccatctttgcattcactttactcagctcttaaagaaacagtagacagttattgtaaatactattagctttatatttatgttgttcttctgtgattaaactttgctgccaagaacattatgctttcttggtagtttgcaacttgagtttctgattcttaaaattggttgcatatcccaatggctgtgatggtgttgaaaactctacttcttttctccccttgactgctgaaccaaatcattttccaagttgctctgaaatatggacaaaagactccttgatttcagccctatgtgcagcatggaaactttcactaggctgtgcctactgactaatagcaagtcaatgcccatcttcccttggttgcttgctaaatattctaaaacgaaaacaaaacagcagtgaattatagcctagcatcagtaagaatggaaaacaactgcttttcaaagcttgatttgtattgtttttaataaggaaggaaaagctttgttatataaacacatgaaaatatggtagtgttcgtggcaagtatgttaatggataatgtgcctaaaatctttgctgggtcagtgtcattccctctttgtgatgctgaaggaaagtcacaaaacaaaaacaactcagaagaagctaatgtgtcatcttcatgtagggatctgtattcaaagttctttttcattgtagctgtaatgaaacagtatttgtggaaagatattgcactcaatgccaaaacccaacaattttgttttcaaattcctaaaaactaaaaaaagaaatcttggtgacataaatgttccaaaatcaaaatgtccaaaatgaactcatcaacttcctcctctcgcctgctcatctatgtctgttctgtctgcttaatgatatcactgtccacccagacagagccccaaactcttaaatcattttcaacttggttttctcatctgtgagatagagctttcctggatcatctcttaagattctttccagccctgaaagtctgcatatctgagttcttcactcatactccccacatatctgaatcctgcttctaaaagtctctcttccctagatctctggtttttaggtttttaaaattattttattatttttttatcctgctgctgctgctgctctaattcaacctctcattccttcttgcatatgctgtaacctcctagccagtcttcctgtcatttcaaaaattattcttaagtttacctacagtaaaattcatcatttttgtgtagctttgtgggttttgataaatgaacagagaggtaaccactactctaatcagtatacagaacaggtcagtcaccccccaaacatatttcatgatgagagtttgtactcaaactgcccgccaccccctaacccttagccctggcaacttctcttctcttctatatccctagagttttgtattttccaaaatgtcatagattggtatccttctctttcagcacctgttcccagcccatccatcctcttcgtcaatgccatttatcttcctaaaacatctctgttgagcaccttgagaaacacttagtttctccaagcttcagtttccttgttagaatgtgacccagccagagtataaaataaggagcatacagaattctaatactttctaaggaggttggttcctgaggaggacccttcatcttgctaactggggcaactgatgggcagatcagagaagcaggaagtcactctgagtaagaaatggtggcctagagctcttgtgagaaaagggatccaagaagggggtagtagagagagaagtgagagacggagaaaagagaacaactgccacaagaagcaaaacgctggagagggacagatgtctacagaagatgttttgggacagttttgctgttgaatgagtgccagtatccttccatagtggcctcgggagacctgtagttcagacccgtgttgtaggaggtgtcttttgaatgggtcttattttgaggagggacccaggagacccagatctgcaatggggataatgacatctgctccatgcaatcatcatgtggggatcatggggtagcaagataggaccctgcctggcagagattgggcaccaaggactcccttcccaccatcctgtgccatctctgccttctctccttacttcttgcctctcacctggaaactgccgcaaaccaaatcctcctacctccccttcaatgaccttcagaatgccagccctgaaggttggctcagaggtcattgtataccaagctacagagtttggtgtacagctgaccttcagggctggcaccagcccactttccagtctacctcccattaaagttctctgtcctccttactttctgctcccaatcctcgcccctactcctgccctaatcttacgtcccagctacgttcaactcctttgttgaaccctcctgcctccccttcaatgaaaattaacctatcctttgtctacattcatttcatgtttattcattttgtgtctacatccattttctgtgtatatatacaataggttttgtatcataattattcatgtctgtttggacacccctgcccccaactgtgtaaaaggtgctcaattcatatttggttaaatgaaatgaattcctaaataatcacagcaagtttgaacctagtgaaggaagtgttaaggcatttcttttacattatgctctcattttaatgtacaagtagcatgccagctatggggcaggttttactcttccagatttcttgtggttgtcaatgcatcaggcagcctgtttccaaacagctgccatatggccaaagctcctcaagtgacccttttatgtgtataagagcaggacatagttcagatatacccaggagaagtaagggcattgaaaacctcccaggctgctgttgcagaaaggacagggagaatgccactacctggaggtgggaaactggacgttgctatacctgcccctccatcaccatcacatagtttgtgtgctgtcaaatttaagttgccaacacaagccatggaccacaaagacatgcttgctaaatcaagttgagtgagatgcacttctagtactttccaaacccatgctgagatgcagaacccccagccccatgcagacagatttgccctgcatggaaacggtgcaccctctcccgctacacactcagagatgagagatgagcctgtttgtgaaaccaaactcaggattctgtttttgtgtaagaaccgtaccacatggctgacatatgttcagtccatggctggcagaagcctcctgaacacatcccccatccagtacctccccggcagtgacccatctcatatttgcatatgttcccctgtcacaagattgtggggagggtgcagtttgcagctgactccttacctagctacagctccaactaagggcgtgcattcttggggagatgttgggagcatcacaaggtccccttccgttcccagaactcagtttcagaggtcagccagaaagagaattccagaggtcagccagagagagaaggtagcaaggacagagcccctactgacatttttcttcccacccatcccatctccagggcaatggtcttcagcagggaacaacgggccctcattccctgccaggggagctgagtacacacaaactgctggatgggcgagaagttcccccagtgatctttatttttccgtttagaaagaatccttattccagccccttctctccagctgctgcgtgtgagcctgtctctgtctcttgggtggtgcagctgcaggtgagccagctgtgggcggccctgaaggacagcgaggtagggagcctggttgtgaggtctctgctccctggggatgctctgcagccttttgcctgcagcaagtctgaaaccttccatgcctgactccccctttccatttttttcctggcgtctgcccttgctggagtggagcatggtgggagccagcccctggagccttccaggattctcacagtctgtagccagagctgtgtaggcctgacctgggcccagcgggaggaggattttgaataaaaaccagtggttcctctccgtccaaaccccccacccctggaatacattgcaaccaaatatttactcaaggttcccccttgccatttaaaaataagatgcttcacctactagcctggcggtgttctctgctctgaaattttatgctcttgagtcatacatttgaaggtagctttttttggatttaaaatttcaaactaatgaagttgtttaaagtaccctgtcgagtgctgggagctgcttaagcattgccacataagcactgcagaggctgggtctggcgcatacatgccaggcaaagtctgccttgtttcaaataaccccaggaagagtctctctacctttggtgcaattcagatcttaggaataggacttctggggtcccctgtttggggactgtgcttagcacacacacttgggtccttgcatgaaagcctgcaaaagtatacgtgacttcctctcttttctcctcaaccactgcacccctattttggggtattcttagacttcttagtggggaggcagaggtggttgatgatgcgctcccagtcagtcctgtctaccttcttctacctcaaagggcttccattaacatcatccaggaagtgttataaatcctgccacccaggccacatctcagaccaatttaataaaaatatctgggctggagaggggaacccaggaattagtattttttaaagctcctcagaagtgcccccaggccaaggctgccagcaccatatccattcgtcagcgcgctcagggacacactggtaccctgtgtgctgacctgctgcagttagagtgacaaaagccggattttgattgtccagaaaagtaagggttctttgctgtcgctgtggagtctccagtcagattttccattggaataggaaacaaacgccaagtttattttaaaagtgctcttgatctacctaaaactaggaagcaggaagaatcctcggggagcagttgagtctcacatttgaatgtgtctttgcttcctctgaaccaaacttcatggtttcatccattaccaaagaggccctggtgacttaggagggatagaattgaactgaaaattccgggatcgctggaaaagtgatttaaccagtttttcaccacatagggaaagttatttggtgagataacagacctcgaggccctgcactcttctgcgtgtggttctgggttgggatacggttcccatgagcagaagatcattcctggctgattttgttcagtgattatttgtttaaaactttaaaaagaagaagcgcagatacagtacatttgtactcagctagccacgcaaacatctttaggctaagaataataaacaactaaattagtggtttgttttattaccaaactggtagagtttcacaggcaggaaaagacggtacctcccaggctggagaaggttaagtatttttgtcaaggaagattaaaaaccctaaaagcttttggttgaattttactgaaatcagaacgtgaatccatttgagagctagcaaccaaagacccgtagaggtgacatggaatgtttttaattctgagagatgggcgtttcagaactcggaaaatgacatttgttttgacatttggtatttttgttgccatacttactgcctttagttcttagtggaagtagtttgctgctcctaattacccaaaaggcaagaaaaaaataactagaaatttttcaaaagaggggaaataggtcttgaaagtttcattaattgcaaaatgaaattaaatggagcattcaatagaagtacttctcagaaccaatggagaatttctcagaaagaagcccattaaagctggattctctaaagcagtggaaatcccaggaacaaaagccaaatgcctgggaattgagtttcagaagaatttttgaattggtacagatcagtaatttacaaaatggaatggaatcactgaatgttctaaaatctgttcagctaaaatgggataataaatttagcttacatggaccctgcacattcaacttgtgctattatgatatatatatctatatatatttactgctatttattaagcattttctgtgaaccagggcctatattttgacatacatgatcttactttgtctaattacaaagattcagtgcctttcacagaagtcattagtagattttgggagggtcgtgttgatgactttttggtgttttgagtaagtaaaatgtgtaatggcatttgagatattgaatgcttgttaaagctgaccttgaaaataagattttcattccattgccgtgctttacaaatcaaactgccatttaggagggaaaaaagacaaataaatgaagtcaactttctttatttcttaaaccatgggttaaactgggtatttggacagatcgttttcaaggccactataggatacttcaggcaagtattttgaaacttgaaagcatttctgataaacttccagggaaaattctgatcttttggtccatgagagaaataactgctagttacaactctggattggaatcgcagtttgaagataatcagaactgcagcttaaacatcatcaaagagtgacctgtagcttagctttcttaattacatgtgtcaagaacttgtgataacagacctaattgaaatgacttattgagtcaggtaacatttatgcccttttaattaactataatttttaatttacctgatcagcattaagctcactttagccgacaaaaggctatgggctacagtcaaattgcaaatagaatacttagtaaatgtgatagtattagctcctactatggactaatattagtttggtcttgaccagaagaaatccttgtgcgtatttatgttgaaagatgaaataacttactgaaattgttaatgaagtattggataagctactttaaaaataacaaacccgactaccagcaacaacacaaataaacaaaccgtcagcctaaggtggacatgttggcttctctctgttcttaacatgttaaaattaaaattaacttctctggtgtgtggagatgtcttacaataacagttgctactatttcttttctttttctctttctttcctctctctttttctttctttctttctttctttctttctttctttctttctttctttctttctttctttctttctttctttctgagacaaggtctcaatttgtcactcagagtgaagtgcagtggcatgaacatggctcactgcagccttaaccttctgggctcaagaactcctcctgcctcagccctgcaagtagctgagactacaggcacgtgccaccatgcccaactaatttttgtatttttttgtagagacaggggtctcactgtgttacccaggctggtctcaaactcctgagctcaattgatccacctgtctcagcctcccaaagtgctgggattacaggtgtgagccatcacgcttggcctattgttagtattttttaataatttttttaaattgtggtaaaatgtatgtaacataaaatttatcatgttaaccgtttttcagtgtacagcttagtggcatgaagtttcttcacaatgtcatgcatccatcaccaccatttatcaccagattatttttttcttctcagacagaaactcaggatctgttcaacagtaatgcctgttcccccacgcctgcagccttggcaaccaccatactactgcctgcctctatgaacttgactactctaggtacctcgcataagtggactcacacttgtgactggcttgttacactaagcatgatgtcttcaaggttcatccatgttttggcctgtgtcacagcttccttcattttgaaggctgaatgatattccattgaatggatctactacatattgtttctccgttcatttattgatggatacttgagctgcttccccttttggactaatgtgaataatgctgctatgaacggtatgtacacatatctgtttgagtgcctgctttcaattcttttgaaattccacttccagaagtggcatttctggatcctattgtaattctatttttaattttttgaggaaccatcatactgttttccatagaagctgcaccattttacatttctaccagcagtgtacaagggttccagctgctctaattcctgaccgatatttcttattttctggtttttcaagatggccctcttcatgagtgtgaagtggttaacttattgtggttttgatttggatcttcctagtgattaatgatgttgagcatctttcttatgtgcggattggccattcatttatcttgtttttagagaaatgtctgttcaagttctttgttgattttttaaaatcaggttgttttgttgttattgagttgtaggcgttctttacatattctggacgttaatccgttatcagatatacaatttgcaatgctaccatttcttgaggcttacagtatgccagatgttctactaggtgctttatatataggatcttaattcattttacaaccctgagaaatagatattatcaccttcatttaatagatacggaaactgaggctttgaaagtttaaataactcattcaaggtcatacaattagtcagtggcaggggtaggattggatcacaggtatgtctcactccaaagcctatgatctcatgcagtttggcatggatactcttctatctttttgatttatgattttccttcatttaaaaaatcttttatttagaagtataataaatataccaaaatgtaaataaaatataaatgtatatcccattgggctattttaaagtaaacactttgtagccatcatgcaggtaaaagaaacagggcattgccagcccccataaggccatgtcccctgacaatcatagccctgtatcttccaccaaaggtagaaattatgttaagttttatggtagccaattccttactttccttacacatttaccacctaagtatgtcaccctaaatgatataaattagttgtgcttgttatttaacttcatgtagatgaaattgtagtgtatgtagtttgtgttttgggcttcatttgctcatagttacgtttgtgagatttcatgaagctaaagtttgttcattttccttgttgtattttattgtgaaagttcacccactgtatttattcatcctgttgtttttgttatgatatataatgctgctgtgaacattattgtacctgttctttggtgccttgtgcatatatttctattgggaacacaccaaatagtgaaattgttgtagatgtaatgccatgtatgagagttcctgttgttttgtatactctccaaacttagaactgtcagtctctttaattttagccattctggcatgttcacaggagtatcacattgtgggtttaatttgcatttccctgattacttattactaataatcttttcatatgcttattttcttttagaacgtgcctatgcaagtctcttgtccatttttcaactgttttctatttcttatgaatttgtaggagttctttgcagcttctggctatgcatccttcattaattttgtgtgttgcaaatatattcttccattttgtgacttgtctttttagtctcaaaacagaatcttttgatgaaaagaatttcttaattttgatgtaacctcatttatcactcttttccttcatggttggcacttgttgtgtcttgtttgacaatgttgcctatcccaaagtcatgaagattttctcttatgttaacttctaaaagttgtatcatttgtcttttatatttatatctacataatgcacctggaattgagttatatgaatgctgtgaatttgggaggggcgtgtttcctttttttcccacatggatatccaatcaactcagccacatttactgggggaagacatctttttttctaatgcgctgtagtgttaggtttttcaaaacttaggtgtctgtatatgtgtgggtctgtttatgagtctgtctattcttttccactggtctgtttcctacacttgtgccaatgccacactgtcttacttatagctctataagtcttggtattgttaaggaaaaatatttgtaacatttgttaaaaatggcagagaagactttattcaaggaggggaacattgtgataggtagagggactgctgcaacgaggtcttgctgtggtgaggagagagattgggctggagtccaacttctacaaggacaagaggggatttatagtcaagcagcagggtggggtcagtggatggaagaggaaacatcagagacaggggtattcttgctagaccaactcaacagaattcttgctgaaggcaggccagggtgataagatatcaagagttaggggtgaggacagataccaagggtggagaattttcactaaaactagtaggattcttgcttaaactggattctataagacagaaaaggaagcccaaggtcagggtctagtggaagagaaggctccggggagcccgacctgagtttgatctaggagagtctttgtcaatatcctgtagaatatgaccttcacctcattttcttttcctcaagtgtatctggactgtatttggccttttgggcttccaggtgacttttagagtaagtttatcaagatctacaaaaatagctactgagattttgatttgaatagtatttcttcctgataatttctgagtaaaattcattttaaggaagtaggaggggcagtggcctgatgaaaagcaaaaatgaagaaaagaataaggaaagacacagttttgccatcaccagccagtgtttagtgatcttaaaatagctgcttttgtttttgagcatcatttgttgggtatggagttgcagaagttgggttgagggacactggcttctagaatcaaatattggcctccatagagtgtttctgtacagtgagttgggaggatgggcaggggccactgaggactgtggcgtgtccccacgttagagtgtatctcacacagagcctgtcctgaaaatatagttatttttaaaaagtgtttccccctccttttcattggccattttctcttttactactctttacctagcaaagggtgggcatgagaaacctggtcagtggaagagaaagccattttgcaacagtggttataggggtgggagagtaaaatttcctggttcctggggaagctaagcccattggtaggaccagacttttgtatgtgtgtttcttcctttagtcatctactaaggttaataaataccttaaaaaaaaaaaaaaaaaaggacatgatctccctctgtcacccaggcaagtgatcctcctgcctcagcctcccaaggcactgggattacagtcatgagaccctgcactggctcattaacaattttttttttatatagagacagggtctcgccaggctggtctcaaatgcctaaccttgagtgattttccttccttggtctcccaaagcattgggattacagacatgagccgccacacccggccaagaagtgccttttatgtctcaggcactgttcttggtgctggggaacaagatagacaaaatcctcactctcatagagcttaattctagtactagagacagtcgagaaattattaaatagaagatgtaatgttgagctctgataaattctataggaagaaaaaggagagtcagggacagaggaagggaagtgacgaaggagccctgtggatctctgagagaagagtctcccagacagggggcaggtggagggtccaggacaaaggctgggcatgccaacaggggagaaagaggtattgcagtgggagggagggaaagtggcgggaaatgagatggaggaaagcagccctggccagacccaaaacctcacttcttatgatagatatttagtaacacccttttcactcttcaatgatgaaatttgtagaaaatataacctatctacccacatcattacaaaccatccatacaatgccttaactgtaatagaaaggaagtacaaaaggggagaaatgtatcatgaactaagaagtatttcatgactacactggaagacataatggtgtggtcatatgttttgcacccacttgtaggatcactgcaaacgtggcagctataaatccagatggctgcagatgtgttatattggccactcaaatgacataatcggtgttgactttagtgatgtgatatttctgaaatggtgaatacgtgttagtaaagttctaaacaaaacaaagtacatcattccctattgaaatccagcatttatgaaaatcatggaggaaacccttgtgttgacaggtaaaatggcgtaggcttttcagcccttccaggggagactggaaagtcctgggggacatagaatatttgtggcttgtgctagaccatcccatgtactgcaggttgtccagcctgtctggccccaccccttaaatgccactaatgactcccaattgtcctgtgactaccagaacagcccccatggatttccagatgctttttcaagcattttgggttttgtttgcatgtaatgagaagccagcagacagtttggatcagggaagtgaagtgacccaacctaggttttaaagagatctgccattcataaaaataatgaaggggaggctgaggtttctgtgtcacttagcaaggactcggcccccaagagtgagctgcagaggtaccaggctgacctctgtctgtctcaagcttagactcacccagaagtctgtctttctaccccagagccacctagaccatccatcagaggcctccctctaatgaggagtagggtgggggcaccccatggtgtcctttgtgccctaaaccctttacaataacaggtgttggctgtcacctgaagcaggtttcaaccatcactcccttcccaccatacacacactcccagctcattttgattccttttcctgcaataaataacagattcttgcaaagtggttagaagaaattagtaagttaagcctcacactagggttattttgccaggagaccttcctttcctaggtaaccccctccaccacgtgggcaccccagtgggatctgctgcagtctgcgccagggtttgcttggcctgcaagggttggccatggcagatgcctttcctgtaactggaatcccccatgcctggccttccagacagtagagagataattggataaaccctaaactggaaattacaaacaataactactctgttagtttacatatgaaactacttaagcaagtcctttttatttttatttttcgacaatatgaagctcattattcgtgacactcggggcactctcaaaatgtgctcaagaaaagggtcacggctgtgtagtatttagcaccagaatggaaacacccattccaagttctcttccatcctttggccactgagaggtttggtttagtggtcccggggaggacaggaaggggagagccactttaacttgctgttgttgagtgaaggtggggcaggagtgaaaggcattgttgttgctgagtgtgttttcatgaaatctaaccttatttaacatgatctccagtaactcactggtcttcaagttacataaaccttgatcgaaaattatttcccttttttttttttttgagacagggtctgactctgtcacccaggctggagtggtgcagtggcgtgactggctccctgcagcctcaagcaatcctcctgcctcagcctcccaaagtacagggattacagacatgagccactgcacctggccttgatttttttttatataaaaggatattagagcaaaagagtgaatatgtataccatagtggtcaaataaatacttctgcaggggccacacacaaaactgtgaaggcagaatctatttctgtccttagatgtgttggtcaataggtgtttgggcccgtgaatgtaggacccaaatgtaatagcagcactatactctacagcgtgtgcatagctggattcagaatttttggttttaaaaattaagcttttatttatatttacccatcaggtcaccgaatacttggattcaaccaaatgcttgaaagcttcttcatttgggggaaggtgggtttggaggcagaaatccctgcagactccacacccggggttttactaggtcctccgcggcaggtggaaggaaagcttgttgccctgcagttccgtttgcttcaaaaacaagggtgggaagggttcaccaattgatctttgtgcatatccagtgtaggaaaagtgttatttagagtatcattataaaatcggctgcatatggtggctcatgcctgtaatcccagcactttgggagtccaagatgggcagatcacttgaagtcaggagtttgagaccagcctggccaacatggtgaaaccctgtctctactaaaaatacaaaaattacccgggcatggtagcgggcacctgtaatccccactactcgggaggctgaggcacaggagaatcacttgaacccaagaggaggaggttgcagtgagccaagattgcaccactacattccagcctgggtgacagagcaagactccatctcaaaaaaaaaaaaaaaaaaaaaaagagtatctttataaaagcttgactcccatggtagatggacctaattaaggtttaccagcaagtcccagatattagcatagcataggaaattaccgtagaggcatgtaggagtcatccagatttggccaactcagaggatagagagaaaaaatatctctccctccttcctaatctcaagggagatggaaaacaagaagatttagagcttcaagaatgaggattgaggaagtacaatgtaaaaatggctccctgggtcccttcttggaaaaaaatgtccagagagtttccaaaagtggttttcccctcctttttgaggaatatgtgtttttattcctttgtgaagaatatcatcttagtagtcttatttcatttgtctatttccctctttaatattaatttgatctgagatgcttgtaaagaccaagcaacaaaaagatgtcatgccaccttcatttgccaccatcacctgtgaagttcagacaacgcagtatagacagagccttaagagggaggagtcaggcgtgaggctttgtgaggggtgggtggtcaggggtgtagccacagcctttgatcataaaccatgaccggttagaactgggaggaacctcaaagtcgctaggttcaactctctcatttcatagacacgaaaaatgaggtccaaagagttcaagagactgccaagggttgtacagctaatcggccgacctagcaatcgaaggacagatttgagtatttttttttaaagcataggcttttaagttctttatcattgtcagtttactttggtttgcctttaaccttcaccaccccagctggtaagtgtaaattgtcattgttaatgtgctttttccttgaactgcttgtgaaggactctctttcaaaggagccggtagaagggaggaaagttggtggcatattacatatctctacgctgagattcaatccagaacggccttgggagttcttcgtcggctgacacaaggcaaagccccagctctgatctgaaaagtttgtatgatgcattttccatgtgtattggttgattggttttgctggaagacctaaccaagagaaagcattccgaccctggcgttagccccactcatgagtctactttatactttctacattttgtctataaaatttgccacttaaaaactcttgtttcatagaaaatggacttgattatctgtatcattatgaaaatcctgctgcattatcaaatcttcctaaaaggttaaaaagcttttttttttttttcaatctctgtctttgctgtgattttagactgggttgtaaacaagctataatgtgaatggactaccaagagatctacaacagaagcagcctcagaaatagaaattgaatttataggcagtgagataggataattagcttttatatttaaaaatatcctcagaccagaggagtctgctgtctcagatagagaagggaattgagtttgaatcctaatgcctcaagtaatttagtagaaactgcctgttttatataaaatatatacggcagcctgctgtgtgtgtatttatgatctgtatctctatattcctctctaaacacatgagttaaagtgtcagtctaagtctgaacattcagattacacaaatcatttgtacttataattctcagccttaaatgttgttgttgatatagctaaagataacctgattggccaattatctcccttttttctttgagtggttatttggagttcaaaaatcaaacaaacaaaaaacatttctgttttttttacatggagagcaagaattgtctcggatgtttacccgaagttttttgttttttatccaaccattatgcactacagaatgtacaatttaaaatgctctatgtaggttaaacaataaaagacacgagaatattaagtgtctgctattgttaaatatgtgtaaattcaacatacctcctgtaatggccagtgtcttagccgctgatccctgtcactctgaattggcagaaaccagatcctggcttgggatcttgaacagatattttttccagggttgcatcacaactcttgggagggcatcctgtctgaaatatgctgtctccccagcctgggtcagcagggacagagagaaatagcatctgtcagctgggttgaagtctcccgcatatggagtcagtcactggttctttgctgagggttcagctaatgagacttgattgcttgtggcactcttgtttccaccaaaaagagcctaaaaacaggatgaacttgaaaacaagaggaagtggtgctatgcttccccatgactttagctccagtttgcctttgagcaagggggaagcagaaggaggaacttcttacgtacctgcacggtggttcataccaggggttcatcaaccctgggatcttgcccccttctctgcctcctgtcataaatctctgtttcaaaggaaagaaaggggatggttgttaaagcataaacctccaggtcagctcttgttacattagaccccaagatgatgtccaaaaccttttgttgaactgaaatgctagcttggtttgaaataactgagccattcattgcctagggatagaaaatctttctgttgtaaagaggtggttggttggttggtgtgtggctttgtttgcaaatacagaaagtgggatggggattggaatagtattggccttgtgggggctgaatattgaaagcagcaaaactggatgtacctaaaaactaaagttgaatcggcgagttcatccatccttttagagctattttcattgagatataatttctttcagttgcttgaagttttcagcatcagatcaagttttctttcttgctctccaatacctcttttgcttgtttgccatctgttcatttccactgcaaactgctctttacacaatgttactcggtgttaattagaacacgtgtctctttgtcattcatctggagaaggggttaatgatgatttatgtccctttaattggttttcctccaaactgttaggtttaatttattattttataagaattccaagagactgggaaagaggaagagtgcctaatttttattcttcatgtctttaactatatatctcttttgctttaaaaaagagcaatcttggcctaactattttggtgttttaaaagtatggttctttggccaggcgcagtggctcatgcttgtaatctcagcacttcggaaggccgaggtgggtggatcacttgaggccaggagttcgagaccattctggccaacatggtgaaaccccatctctactaaaaaacacaaaaattagccaggtgtggtggccacatgcctgtagttccagctactcaggaggctgaggcacaagaattgcttgaactcttgagaggcggaggtcaaaatgagctgagatcgcaccaccgtactccagcctgggcgacagagccagactgtctcaaaaaaaaaaaattcttcaagttcttattaaatgataatacatatgagtatgtatttactgcttatcagtgaacaatttattagtcaaatttgttagcttatttctgaataagtaacatgttatcatggttcaaaattgaaaaggtcccaaaaggtatgcagtgatttctttcctcctcctcctattgtccccagacttctattctgggaaaagggtttcctttccgcagaatctatgttgtcagggtcttgtgtgtacatatatttgtatttatgtatacacatatgtgtatagatggatatatgcataggtacatatatatgtaaatactttccctctttttatgcagagggtggcaaacatatatgctgttctgcatataccttttaaatgcattttggaatgtactgcctatcggtaggttaagagcttcttctttctttgttaaggctacattatactactgtatgatgacttattaactacttcctgactgatagacatttgggctgtttccagtttttcccaggatgaacagtgattcagtgaatagctctgtatcacattattttgtatatctctaggaaaaagatcctagaaatggaattgttgcagctgaaagtaagtacatttatcatttcgattgattttgtcaaattgccctccatagacgttaacagttaacaattctgctagcaatatgaatactcgtcagcttttttcatacttgtgaaaatagtaggtgaaataatgatcccagcttatggtttaatttgccctttcacttattttgagtgatgttgagtataatgagcactttaaaggaaaaaagataaatttttgtagttagatgtatatatatacatttcaaaggtggaaacctgtttgtgcattttcctttctaccccctcaaaacactaggaaattatacctagtttctagtaaattagatagctaatttctatattggtgtgttattaacagtaaatatgctgcaaatgttggaagatacctaacattctccttcatgtgattaccaaaaacatattgctgaaatccaatttcgactgacattatttttcaaaataatacatttcaaactaatcaaatcaagttttgatttgtaagggcacattacatgatatcttttaagatacaatattttaagtcaattaaactctgatgtatgttgctttttaccaaaagcacacagattatggagaactcaccaagtgactgacatgataaaaaagcaaagttcttttagataaaaatggccactttctccttgatatttttctatgggttgagatttagatgaaaatcccttgtggcaaattttaatgactatttctttaatgtaataactgaattcatctagatgatcccacgtccctcaacagagaaaggtgagagtctgttatttgttaggtttccttgtccatatttcttggtgggtcccacaaaagtctcatgaatctctacaagtgggaaaataaattgcccatttcttggcacaccgaactttccatgtcatattttaaaactgtaagtccatactttacatagctaaagaccaatgggccaaagcatggtgggtcacacctataatctcagcattttgggaggccgatgtggtaggattaattgagcccaggagtttgagaccagcctgggcagcatagtgagaccccatctctatagaattttttaaaaaattaccgatcatggtggtgtgtatgcacctatagtcctagctacttgggaggctgactcaggaagaccatttgagcccaggaatttgaggctgcagtgagctatgatgacaccactgcactccagcctgggcaacagagaaagactctgtatttaaaaaaaaaatggaaaaagaaaaaaagaccgaataataataataatatgtaatatttaatactttcatggattgggtactgttttccctcccctgtgagtccctgcctatgtttccttcaggccataaaaagaaagcttgtctggcaaatatgaaatttgaaaactgaccatctgctgaattataatagtagagatttacctttgggataaatatatttgtcattgccacaaagtttgtgaataatatttctgttgcccagtcatgaaatcaacaaacctccaaaatgaagttgctttaagtgtgtaatggcaattttgaattgttaaagtattccacactgtcgtgaaaccaatgtaaacccttgctcagaactagactcacaaaattttagagccagaaggaggtttggagatggtccagcagttcgtctcaattttataagtgaaaaaaactgaagctggggcaaggttaggaacatgttagcaagtgagtgaatgagtgagttacaaagctggcatccttgaatcttggccccagacctcacctggctaaattgttccagaaatcttgcctaaacacactttttttgtagtggaagaatgtatgcccttttagaaatcagttctaaggtctcttagtaaaaccatgtggtaggtcatccttaactgggggttggttttgctgaagacagtgagcacaagagaaaaccacagaatgctctttctaagaaacatctagacagcactcatgaggcatacacttggtgttccctccctctctttttcattggtaggctgtaaattactcccctgttggaaaaataaggtcttcaggctactcacggtggtgtgcagacgcacatacacaacagtgacagctttctagtggcttccgccatgcgtgaaaagagatgcaaaaggaatgcaggaatgttagagaaaataaaggcatcgccgctgattagctgggactgatcagagatgggttacttcacgtgaagcatgtaaggaaacctcttgtaaagacttttattatatttttaggaaggaaggaagaaagacagaagagaaaaacagagaaggaaagggaaggaagaagggagagagggaggaagagaaagacagagggaaggagggagagagcagggatttacctgcattacaggtagcataccttctccaaagtctcctttgtggaccagagggaccattggtggcagctcccttaaccacagtccagaactttcagtattaaaaacttagctgatacctctcaaggatatatatttactgcaggtccttcatctgaaattcagacacatgtagctagctacagatcacctataagatgtttcaacctcaacaaatttgggacttaacccatcatcttactccctccgccacttcctttgcttgatcttcttatctcagtgagttgcatcacagtcctccaaactgatgaggtcaaaactctggtaattatcctcaattctttcttctgtcccacctctagccaccatctaggtcaaacagcccagctgactgcacctcctttgtgtcttccccactccatcccctgcctgctgccactgccttagttcacagcctcatcatttcctccttgagttgctgcaacaatctccagctggcctctctgccacccagtttttgcctctctccaacctgtcctcctgactcttgccagagaaatttttctaggaaaacctacccaagcacggaatgcccctgtataaatgctccatgggttgctgagcacccccagagaaactgtcgtgactgatccacgctctcacttcctcggccttgcatcgtgctgtcccctgccctcccaggctctgtgccagtcacccaggcttccctcagtgcgagcatctcctcacctcctgacctttgcacaagccactccttctgaggagcactctctgtttcccctgcttctctcctccttgcctaactcctactgagctttctaatctgactttgagggcacttttcagagatgtcttccttgaccaaccgagtagacttatttaacaaacacttgcataaatttactgtgtgccaggcactgacctaaaggctttacatatattccttcctttacttctccaaactttaggagaaagggaggattccagtccccattttatggatgaggaagctgagaccttgcttgagtggtgaagcagcttgcccaaggtcacacagccttgtgggccagaagctacttctgcctttgtgtggctcctgattttgatttgtatgtagtataaatatatatatttttgtgtgtgtgtgtgtgtgtgagagagagagagagagagagagagagagagagatttatgttccaaattggttccgggtttgtcatctgtatatttaatatataataaattatatatacaatttattttttgaatagacaatagaagcacatattataaaattcaaaaaatacaaagtgtatacagtgacaggagcctccctcctcactttacctcccacttctccccaaaagcagctcctgtcacccatgccctgtgtatctttccagggatatttacaaatatatatgtagacactatgtgattttcttttatatttatgatagcctattctgcttgagatttttaatttgctttgtttgattaacagtataccttggggcttgttccatatcaatatattaagagcttcctcttctcttctgtgtctacataatagcccattgtagggatataccatagtttatttaatcagtctcctttttggatatttaggttgttctcaaacattttctagtacaatcagtgccgcagagattagcttcctacagacatcattttgcacacatacgagttgatctgcaggataaaatcctggaattggaatttgcggccaaagggcaggtgcatttataattttgatagatagtgccagattgtccctcataacggatgtactcatttattttctcattagtagtttatgagattgccccttccttcttagcctcacccttgcctatataataaaatgttttgatgttcacccttctagtatttttaaccagcttttttcttgttatgagtcgttatgcatcttttaatgtgtttatgaactatcttgattttctttattagctgatttagtattcgttggctcttttcatattgatttataggcatttcctatatattaaagaaatatatcctttgtctgtgatctatgttccagataggtccctggtttgtcatttgttgatggtgttttttccccatgcagaaaatttttattttcatgaaatcagatttatcagttttttttcttttatagcctctggggtttgagtcatagttaagactgaccttccccacgcctaaattataaaatcctcttctatgtgcatgcatgggtgtgtgaggttgtttcaaagaaagaagtgatagagtgtaatcgctgagaaaaccaactgtggagtcagactgacctaactgccctggtttcatctctatttctttaatcttggatgaaatgtttaatgggttagtaatatctatatcccagggttacaggtgactatgaagatcacataccacaatataggaaatcgtcctgtattaaattactgatagctgtttttattgtgttattttctccaagtttaataataattgcacaagaacaagggccctttcttctctttcttttgctttccccttgccattgtggcccttccccttcccaaactctgctgccagcaagaccttagcgtggtgctctgctgatgggactcgagtgctcactttgattgcttcactgtttattttgattggcgacagagaggcctggagttctggctggagccacctggagtgccacaggtgcttctccacttgccacgcagctgttctcccagtcccttgaggaccctggcgcctctccagatcttggcacttggtttctttccatgggtcaccggtgagagtccgtgttctttcctttgggccccctgcagccccttgccacagaggcctcatcccgagaggacttgagacagcgtactccccacatgggtgccctgtaaatatctttgaccaaagaagttaggagaagtaagaggtttggggtgtcatattgactggaagagccacaaatctcttggctatctcttcgttcccattgattacacaggaaggaattattccaaatcatgtatttctttagtggatgatccccttaaaaatttctacgatgtcagtttctgttaatatttactacagtttttattgtcatggattgtaacttcttaaaaatatttaatatcatgcaagctgttcaaagacaccagtaatttggagacagtgcagggaatcgggctgtgatttcctggcttttatctgtctctgctgctcccttctcctctcctttgcctgtttgtgtttcctttgtacactcacttttaacaaaggccccttgaaattccaggggtaggagacacagtggagcattgaggtaggtcatctcatatttaattttgccactctctggccgttaattaaaataatgcttgagtgctagtgtccagttttacagggggtgtgtaaaatgttaatcacaactgatctgaagcatccagtccagtgccagggagagggtttagggcacaggcagggagcatgttatcaggaaaaaaataaactagaggaaataaaacattttgttgttctttaaaaaattttaatatgaggccctactatgagcaaatatgaaggaggatgtgaagacgggtaaggtgcagtccgcggattcaaaggcggggccatctgcatgctgagcgttttactatactattccatttaagattcgcagcaggctgggcgtggtggctcacgcctgtaatcccagcacattgggaggccaaggcaggtggatcacctgaggtcagacgttcgtgaccagcctggccaacatggtgaaacccggtctctgctaaaaatacaaaaatgagattcgcttaaacccgggaagcagaggttgcagtaagctgagattgcactattgcactccagcctgggtgatgagagtgaaactccgtctaaaaaaaaaatttgcagcagtccagaaggtaggccccattattccgattgtatgggtgaggatactgagttgaagaggagtaacttgacattgatcccattgtacagtggagccaagattagatccaggggacctggtttcccagccccatcacctcagtcctattgcattaccctctggaaatgctcagtccagtaaaggagagagtgatgatgcaatgatgtgactgcttccagtgaagagtaaaagtaatgaactagaaacgggagaaacagattgacacccttgagttgtctttctggttagggcttttgggtttttgttctgtaatacagtccaatgtggtggccattcaagggagaagggccactcatcagccctcctgctccctcacccccatcttaattaaataagtctccttaggatctcacacacctgcatgtaacaaaacaggttttaaaaatctgtagtcaaggagcactgcttgtttctttctggcaacaatcccagtggaagtaaaattacactggactgcctgaaactctgagcccaaagcgttaatttttgaaaaacgtttgaggttcctgagttcccgtggtatgctactagaatattctgtagctttaacaactcccagccttcattctgcactgcaccccccgcacacccaatacctattccacatgtctggggataggtcagctcaccgtccaccctcgctgccccctaggctgaggttccctgatgagcacagttttccgggaaggatttcagcccctctgtgaaagtcttcagttatctcctctcttgtttccagaagtagcttctttactccaacttgaaatcttgctgtattccttagtgttttggaaacaaaatgtgcagtaggagaattctggctttgtggatattggatcactttgttccctggcacaacaatctctcctttgtattaaacatctgagaacagaagtcctaaataacatttttatattccttgttgatgtaagttctttatttggggacagcagtttggtacttgttcctctgtcaaattctgatgtactttccctttttcctatgatgaggacaccactgacccctagcctggaattttactttgggtagtggtggtatttgcttaccccgtgggactttcctgttgaatccctctagtctgcagtgagtggcctgtgtcatagtgggatgtctgactggtcggagcaaaggtacccaatcctccagcctgaccatgagctgggtggtgaactagccagccacaaacaagccagatggacagacagaccaaaatagccacttgtccacctccttcctggaaatgcagaagggctgctccggaggtccaagaagacctaatttggtcagcaacccagcacttactctgaacaggaggtggagttgtgagcctggtataagttccctacctccgattctttacttttaccacacacgtttgcacatttcaaggagatgatcagccacactaccaactactgatgggtaacaaatactctttacgtcaaagctcttctgatgattttcctggattctgtacttgtacaatgaatgtacttgtgcctttactccaaagaaaattagtatatgtggctgggcacagtgactcacgcctgtaatcccagcactgtgggaggccgaggcaggtggatcacttgaagccaggagttcaagaccagcctggacaacatggtgaaaccccacctatactaaaaatataaaaaaattggctgggcgcagtggctcatgcctgtaatcccagcactttgggaggccgaggcgggcagatcacttgaggtcaggagttcgagaccagcctggccaacatggggaaacattgtctctactaaaaatacaaacattaactgggcatggtggcaggagcctctggtcccagctacttgggaagctgagacaagagaattgcttgaacctgggaggtagaggttgcagtgacctgggatcatgccactgcactccagagcgagattctgtctcaaaataaaaaaaaaaaaagaaaaaataacaacaaaaaagaaaattagtatatgtgctttactctttaggcaaacccaatattatacaaattcagttttttaagacaggataggacattttatttttcagaaaatgtataaccacattccttaaatggcgtaggtagtataatataaatatggtttatcccctaagaccgtttttatttctatgtgagtttcaaagctctccctttttcctattcattcaacaactccacgctgagttgtcttatgggaggaaaggctgccctgcatggctctcttgcagctaatgaaatgagcagttggctttggtgttttatcactttgggtcagagatctatttcttgctccttactccttcagtgaatatctagttcgtgctccctatggatcaagcatcgtgctggtcttcttccatctgccttgttcccagtgggagcagttggaaggatgctgatggtttcttcctccaggagaggaagggcagtgtttcatgtcactcacaaccaagcagctagttgtcggctcttggaaaactagttcaccaaagggaagcactgagcctgaggccctgggatgggttggattcttttctaagtggaataacattctactcctcctgcttaacctttccttgcaaactaaaatgggaaaatcactctatggacaaagtcaagcagaaataaaaaataccctctctgaggcagcctggcagtacctgcatgaatcagccagtgtttggataagaagcagcccctcgagaaggaatggagcccttccctggaccttaattgatttttgtatttgttcttcttcttttaattctttgtggaaaagtgatttgtactgcagagtggctttaacatattatgggtgctgttttatgtaatactgttcttatctaaagatcatttctgcttgttttgccctattttttttcctgatccagctcatgtttgtttttctttttcattttatttcttctttttgaaggagttattgttcctcttatttctcccacttcatctacccccgttatctgccaggagaataggagaagacatgggccacttttttttttccatttttaaaatcaattggctagatatcacctttctctcgtgagtttgtttcataacgcagagcctcattagtaacgaacctgacccttaagaagttgggttatgtttattcctagggattaaggcactgttctggcctggttggccctttgctgtctgtgctatcgtccgcccctgctgaccagggcgtgcctggctcatggacagggcagctccttgcagaggtaccctgctgtcagggaaagttctatggactagtaactgctaagatcttttttgataaaatgagatcttgaagccttcaatcatgagcctcaaacaatttacataataaatccagaacttggagatccaaaagatattgccatgtttttggttatgttgctagggaactatgcctccgttttcaaatgatacattgctgtgtgtgtgcgtgtacatgtgcatgcatgtgtgtgtatgtatggaatgaggaaaattaggtgtttcatgcttatgcattgtagtgaaggctacagtgttgttaggcttttctgatggatatcataactcaaactacagaatttgtttacagcagtgttcatgtgaccaagaaaaaaaaaagcagatgaaaagtagccagacgtgttcaaaacacaactaatagatcaggtttctggaacatctgagtctaagggtttggtcttcctcacaatatgttgagaggtgatgttttaaaagcaaaaacggagaaaaggccagctgtggagaatggtaactgagacaattagaaagcagatgtgtgcaattgaatgtagtcagccttaaatggatccacactctcttctgtatgagggtctggaagggagagttcacagaataaaaatggagtcattttattctttctgttcaatatagattcccacatacagcgagtatttgaattgtgacttgctttctcattggcgtaattcccacctgcctttggaagtccattccgaggtgaccttgccccctgcaatatggaatgggaaaacacctggctgagtctagacgtctgataaccacgtaggtgggtaaggtaaccactgggatggctggaaggtgttacccagggaaactgaaggccaggatgaaaataaaagcaaacggtttccccttgggcaatgactgccatcaggattctgctgctgataaaatgctgctcctttgttctgcttcctgcgtgttcatccatatgatagctgttagacatttcattcagctttcacccacctggcactgcttcagtgccaaccaacggcaaggtgctccccagctgccatggggagccgggtacaaatagacctcagcgaagccctgcgtgcatgcaaactgcgtttgccttttgcattctgcttttctctcggggccatgcttgggacacttacacgctgcccgctttctttctgtgatgggggctggtgcctttgcactaggcccccacagtcatcaatagccctgttcatgtgggaggtgacagcaacattttgccacattacaggctgcagggctcaatgtgaacattcttcttagagtgagcaaagggcatgggacttctgacggccagggaagtcacagcctgcaccacagtgcgaagatcctccatctgggccatggggagcacttagaatgtctttttatgggttcaataaaatgtgatgaacaaatgtttgtggtgaagctctattgtgaggttttctgatcatatgtaacataattactgaaatctttgtcaggcattgttttgcatttttatctacaaaggaagccagtgacaagctcaccactgttctctgttttccctttagtcggttcttaatcatccaagtcaatagagaaaatcaccatcatcgatgacgcaaacccgtaaaaagtccaaaaataatttgtgtttgattttgagatggagatggtaggcatgtgaacaaaacgtgccaagacatttaggctactttgaggtccaggccaatgccctcccaactcggctctgctccccctgaagccggagaccgtgtatagggatctgggggaccggagggcaacgccagagaacaagtggaggaggtggctatcaatcctcagagtttgtcatccactatgaagaaagctggccaggttttgttctgataacatcacatagatattttatactttttaaaagatgatcagagtgacatctgtgtggttaaaaagccaaataacacagaaggcttttaataaaaaataacagccctgcctgggtcctgtccttccttggtcccactttccagaggaaacacctttgaaccctcccagctttgttgaaagttctttgggtggctaccttcatatctttaaataatatatggtagtaccatttgtactagttttctagggctgctgtgacaaaataccgtaaactgggtggcttaaaacaatagaaatttattatctcatagttctgagggctggaagtctgtaatcaaggtgccagcatggccacacttgttctgaaggctcagggggatccaccccccacctcttccagctcctggaagtgccatcggtccttagcttgccctctgtgtccctgtgtgtccctcctcacatggcattttcctctgcctataaggacgcagtcctattgggttagagcccaccctaacgacctcctcttaacttgattacatttacaaagaccgtgtttccaaattaagtcacatttacaggtactggggacttgaacatatcttttgaggggacataattcgacccataacactactctttctcagtttattgccttccttttatagtcaatggggtttctctccctgattcagcctcgtctgtgtcttctctcagacctcttccctctccatgctccgtccctccacttaaaggacattgcttatttctcaaacaaattcttggaaacctcatttctcattctgttgaccttagagagcatcacttaattactcatttaaaaaatgaaagcattcactctttcggctcccatcttctacctctgagcctctgtcagctagggccaagcttgatgccatccgtgttcttttcagttccctgaatggttaaatcctctgtcatttgtcctcagacgaagaatggatatttgtctacagcttctattgataggatctgaaagttgaaaaccaataaacagtgttatcgtgactctgtctcctggattattatacctttgcatgccctctgggttttaattaaaatactttataccatttgaaaaatgacagcataatttctgtttgtttagtactttagaatctacatttatttgattttagatggcagcatactttgcttgctctgaattgggaaactgtctattcgtttttcttgatgtcctttggcattacatattgaaatgaggctttgtgtcttataaatgtttgatcacatgacacagtagccgcatgggtctctctgtgagtttttagcaacaggtaagccattctaaggtagtgctagccaaactttggatttcaatgcttttcatttcttttttttaaagaccaatacagagatgctaactttttattttgccagaatgggatattaataaatcagctattatttactctcactggtaaaataagaacatttaacatgaaaaacaaaatagtaaggacataaccttggaataagttacacaattttaaaaattttgaatgaatttaactttcaaagaactcattactttccctcatttttcccatttggcatagactggtgaaaacattctgaatggaatggttgtcctagatcaaccttgtttagtggccatgtgtctggttttaatagagtagaacatactgttaatgactctgcttactctgtagatggttaggttgattgattaggacctggtatggaagatgtgcaggagaagggggcaggctttgtgtgaagtgggagagttggatcgccctattttgtgaccctaaactgtaagtagaaccccataccccttgccacatgcccctagtctaagccatttgtaagctgagctagctcacaaattcttgcccaacatgtgctgtgttgggcatgaatttaagtagatacatacagatctgtcacctttatatatgtagcccttgagtaagtcacgctttcactgtcttaatttattaccataaagttggccgggcatggtggctcacgcctgtaatcccagcactttgggaggtcaaggcgggcagatcactcgaggtcggaagttcaagaccagcctggccaacatggtgaaaccccgtctgtactaaaaacacaaaaattagctgggtgtggtggtgcacacctgtagtcccagttacttaggaagctgtggcagaagaatcgcttgaacctggaaggtggaggttgcagtgagctgagatcacaccactgtacttgagcctgggtgacagagcgagactcggtctcaaataataataatttttttccataatgttgtcttcccatatatattttaccagcttgaggtaatataactagtaaaacttaagcattcaaccaatgcacaatgacaccatttttctaatcttctctgactaaactaagtctaaaatggaatattattgactaaatgtatcccatcgactatatttgattaattaaccatcaggtaaaattctttctctccttaaggaagaagagattgggattaagattggttatcagtcatacccttgccacattgaattgaattcagttttcagaatgttaatgctttaataggaagttttgtgaaatcccttcagataagaagaaaattaatttcttacttttttttttttggtaagaaatgtttgtgtgtgtggcggggggggagggctgcagccaaccacaggtgattttaatgatggtaatatatagcaccttcctaggaccatgtggtttaaaacatcgatgaggtcctcttcacaacatccctgagaggcatttagatattgtcttcccatgtttttttgcacaggggaaattcaagacagactgaggttaagaagtgagtagcccaagtttagtcagcaggtcaattgcaaagtgagaaaaggaagtccagctctttcaaaccacatctcttatcctggctaatgaacagcatctccctgagtccatactctcaactttaagattccactctaggccactttactttttgaagatctgaacatttgaatgaatcagatacggctttccaattagaagtgtagacagtcgtgtccctcaaggtttcattgtaaggataaatgaaggtggtgatgcttttgagcccctgggacataggccagtccccagagaggaggaagcagctctgaaccagcagcatccctgagtttgatttgtttatcagaagtaatggtttggatagagctgtccacactgtcatcccattttattggtgaccaggaacatataccacagaaaagttatgaattatgaaactagagaaggtgacaagtgctggctttatgctgctctagctctgtgtcacttaactcttttggacctcagccatgccatcagtaaaatggaggtcatgatgttaactcctttccgttgtctttcatcctttgattcttctaaatgcccttcatcggaatcaaactggcagccgtacacttgccaggtctatgcacacagcagtgagctctgcaatccaaggaccagatccaagtacagatagggcccatgttttgcagctttgcattctttctcctctacatttcatctctgcctgcattccatgtcacctttggaagacctcatatgtcactgtctttctgccctcattgaacagagtgcactacccgtgagcttccagtatggtgccttctggcaatctacttgaagatatgatcttcattttggttgaaatctaataccccatgtgaagaacaaggacagtacaactcaaaattctggaccactgcatatggtatcttttctataacccatattttaaatacgtgtattaatttataacacaaacatatggatgtttcaaataacgttgggctataaaaaactggtattgataattgtgaccccaatgatgagaagcactcatcagaagaagaaggaattccattttttttttttaaggcagggtcttgctctgttgcccaggcttgagtgcagtgacatgatttcagctcctgcaacctctgcctccctggttcaagcgatcctcccacctcagcctcccaagtagctgagatcacaggagtgcaccaccacacccagcttttttttttttttttttttttttttagcaaagacagggtttccctatgccgcccaggctggtcttgaactcctgacctcaagtgatccacccgcctcagcctcctaaagtgttgggattatagacgtgagccaccttgcctggacaggaagaaggaactctgtctaagcacatttttggttttgtccagtcatgttgtttacacggccattgttacaaagcagaaaagccaccaggcatctctttacctctgaagcaagcattctaaatagttgagagtttgtggtacataaaaagaagccttctctcatgctaatgttttcaaaacaagttgtgacttctgaaagtagagaccaaagaaagaataacttgaacaagatttcagtgggtagaaaataaacactaactttatatgtatttcaagaacgtaaaagaaacaggtgggaaatgaatcctcctcgataagagagaaatgcttagtagggtggaaaaaaaaaaaagacaacattcagcagtttttggaactgtgcgagtccagagagtttctttctttctttctttcttttttttttttctggttagctctcatagccacaaatatgtatattatttccttcttgcccacaatttactgagaatcatctttctaatatactggggaatcccaaataaaaatctcatttttctaaacacagacaagtcttttaactcctgcaattaaatgattcaactattcatatgtagactgtaaaagaaataatcaaattgttctagtagaaatctccaacggccatctcaaatagtttccttcccaaatttatactgtaaacggcttaggtttagggaggggttttgccctagtcactgatgttttgaaataggactcagaaacctctttcataaagtctctgcggtgattgggctaccccagcaatgtgatatagtggtaggattacagaatattttaacccttttctgaatgttgcaatatattcttatatgggaaatgattgattattaactacttagaatgtgtttcttttccaagcatgtcagcagagtaagtacagcagacttcgtaggcgatcagtgtagtgtcaggtgtgagcagtatggactggagatggtctgcctggattcaaacctctgctctgtcctttcctacccaggcttttctggggctccttctgctcatctgctaagtgccacgtattacagcattttcctcatagggctgctgtgagctttaaatgcgtttatgagttaactgcttagaacagtgccagctatgtaataaacactacgtaagtggcagctacaccatgcataaacaaacgcaaactgtgtgcatctgaggaataattctagttaacattaaagtgtgtttttgtgtacagagttggtgtctgttgtctgtgcattcactttttaaaaatcgggaaatagcagatgttaggaacctatttattttgcttgctcttccttctactttctgcttgctacctactctattctagttccagacttgatctgtttctctgtgcagggttgctcctatgtacaaccaatgcagaactgaccccatcaaatttacaaagtgtattagtctgttttcacgctgttgataaagatataccttagactggacaatttacaaaagaaagaggtttattggacatacagttccacgtggctggggagacctcacaatcacggtggatggtgaaaggcacatctcacgtggcagacaagaggagaggatcaagtcacatcttacatggatggtggcaggcaaagagagcttgtgcagggaactcccatttttaaaaccatcacatcttgtgagactcattcattatcatgagaacagtgcagaaagacctaccaccataattcaattgcctcccaccgggttcctcccacagcatgtgggaattgtgggagttacaactcaagatgagatttgggtggggacacagccaaaccgtatcaataggtatggaaggaagtaaaatactattttttggtaagagctctcccactaagatatgaggacatatgcagaaagtgaggaaataaaactcaaagaaagtgaggaaataaaactcaaaattggctttcaaaagcaaattttctgtcagtaagatgtgacacgaatgttaaagttttaacaggttttgtttccttgtaaatatttacttcactatatctaataatctttgtgaatgaagatctcattggtgtcttttttaagatattaagaatattaggattacttatatttgaggactaaaagattggtagagacataattctatccttgtggcttctttgcatactttaatgctaaagttcagtacttaagattgaataaaaatgtcttgacaatcagatataaaataccttctttgggctgggcacagtggctcacgcctgtaatcccagcactttgggaggtcgacatgggtagatcacctgaggttaggagtttgagaccagcctgaccaacatggtgaaaccccatctctactaaaaatacaaaaattagctgggcgtggtggcaggtgcttgtaatcccagctacttgggaggctgaggcaggagaatcgcttgaacccggaaggtggagtttgtagtgagacgagatcacgccattgcactccagcctgggcaacaagagagaaactacgtcaaaaaaaaaaagaaaaaaaaaccttccttagtgtcagtcactctttttcttttctttctttctttttttttttgagacagagtcttgctctgtcacccaggctggagtgcagtggcgggatctcggctcactgcaagctccgcctcccgggttcacgccattctcctgcctcagcctcctcagtagctgggactacaggcgcccgccaccacgcctggctaatttttttgtattttttagtagagacggggtttcaccgtgttagccgggatggtctcgatctcctgacctggtgatccgcctgcctcggcctcccaaagtgctgggtagtcactctttttcttaaggttacacagtcatggttgactttgtaggggctcaggacatgccaccccagactatcatctccttttccaaggactgttccaatataatttctagtacctgagagactttctctgcataataagacacacttgacccaccatacagagcctcccctcatcaacgcacagcttgtgtccccaccacccccagaagccccaagcccctattccgttccatagctcaggatgctaaatgagtttcaaccgtgtgacccttcttcaagtctcatattttgtgggactcccatgtgcacctacattattaaatatggggtttctttctgttaatttgtcttacgtcaattcataacccagccaagaaacccagagcggtggaggaaagccatttctctctcccctacaacttttaaatactaaaattaaaaatgtccccacccaccaatattggaactccgtggtatccataagctgggttgcatgttagtgattgtaataagcaataaaaatccttgcatgtcaatattttattaaatttgattattcatggatttgtgaccattattatttgctgtttattggtttgttgttgtttttaaaatattttacttggacttatggaccacatgtttgtttcagaaattcttcaanaagacagcaaatccctagtaagtgggaagaaaaatcacttaacagtattccaagtacctcaaaagatgcaaatatggaaagatgaatatgaaaaagggtactcctagagtttatcaattgtctatccctggagaaagtttccattctccattaagactccaacggctttgaatagtatatgcttttgtgtatacaatgaaaataaaccatcatcatcgtcatcatattaactgggcttgtgcccattgtagatttcatgaaaaataaccaaccatcaaaaatgacttgacaggagaagccaacaagccctaacattaaatggtcctgtaaaagtttgcaggtatattatttgtgtattcagtaatactctcaattagtgtttatgacttcattaacttaattcatttttcatgaatggtaaaaattcactctttcctacattcacaaatgataggctattttgatggaaaaccaaagactcactatatgttctcctttgcagtagcggtagtagttgcagccaccaacttcagatgtgcagttcctagtttactatgtgattcagtgtgcttttattgagggcctccttgtcgagagagagtataatacactagcaggagtatatgttttggagtcaaactgttcttggctcagatcctggcacagctacttgcttactgtgtggtcttgggcttcctggtctgtaaaatacccgccctgcagagttcttgctgagttgaagtgagaggatgtatgtgcaagtgtgcggtgcggcattcggtgggtactccacagcactggcttccctttccttccacactgggggcctgctcctctaattcctgttcaccaagtagacggggaggaagagagtggtgcctgaaactaccattttttttagtgagtcaaacgtgtcatgttgtgacatcttaggcatgtcccttcaccctgggggtcttggttaactcctctgttaaattcagagcttgcctttttttttttttttttttttttgaggcggagtcttactctgtcacccaggctggagtgcagtggtgcaatctcagctcactgcaacttccgcctcctgggttcaagcgattctcctgcctcagcctcccgagtagctggagctacagtcacgcaccaccatgcccagctaatttttttggcatttttagtagagactgggtttcaccatgttggccaggctggtcttgaattcctgacctcaagtgatccacccacctcggcctcccagagtgctgggattacaggtgtgagccaccacacttggccagttgacctttactttatgattatttctaaagcacttccagatctatccttctgtgatgctatgatactatgaagcattaagttgagactaggagattaacagtagggtgttaaatggacaggactgatcacaatcttatatggtgaaggaagaaccaattggacttagtgacacattaaatgtgattagacatgaattggaaactattttgaggtaatgttccccaggatgccctctccaaaacactagttgctgaggatgggaatagatgttaattgaaaaaaggtttctgaaaagcatttgggaaatgctaacttcaccaggtttctttcctgcaggacttctctgattctttaatatgcccatatgcatgatgattctgaaattggggaatgtagtcatagtaggaagcatttctaaagcttatttcttcatggaatcagaattatgttgcacccaagtagcatcttacaggaccagtatttcatggaaaatactctgtgaagtgctgctctatggttttaaaccaagaatgaggtacaatataggggcattgactcaacccagtgaatgtgctgagcactgacctcgcaagatcctgtggagggcggaaatggataagatcccacctctgcaacaaggctggcaataagccattagtggtggcattgtctacatggctaatagcagggatgccttgggggagacaatatcccaccgaattactgatgcagattcagttgaggcagtatccccagggtgcaaagtcctgatttctctctcggatgtgcttattctctgtctctctatgaagctcttataatggtattagcatccagttcaccacggagaaattctgcagataaaatgaacgtaggagctaaaccaatgggaagtttcattcaggagaagattttacaaaatggactctttggacttcgtttttgagtacatagttatttgaccaccatttctacacttggccttaaagtcaaaatataatctaaggcgagaagtctaaaaactatgtagtagacaaccttgctttactgtgaaggacatggcatctcaatgttggcagaacctgacgacgtagtttgtttttatttctcattgatgaaagatgagccagaggcctgatggcagattttactgggaaggaccttttctcaccggtcagatccgtggattatttcaccactggatttttctgcctgttaggcctttggaaacattttggcagattgagcagttattttgctcatgttgtgagtagcgtttctctgaccttttgttatttactgaaacaatccagcctgttttcttttaagagaagcgtgaaatgaaggggagtcagtcagcacatgctgactctggtatcagaaggctaacttttgggctgcttggcaccatgtatgcttttaaagttatggggtcattggcctctttgtttcttattcccatgattttgaaggagtcttttgggggaatttttttttccttgctaaagcagatgcatgtaaggttagtaattaaaaaaatatatttcactatgtctataaacataaccctctaagttttcttacgacatcttgggcatggtagattatctgaagcctctcctcttttaaacattgatgtgacgtgatggggaggccagcttggcactggaatggtggcttggtgacagggcatccctcactcctgacctctcatgaccttgtgagtccagacagtggaggtgatgacaccattcaggacgctctccaccagccgcaacagggaactccttctccctagtgctctgcctacctatgcccagaaaacctatctccctgatgtttttctggttcttcccctagtagaagatttccattctttgcaggttgacttgcaaggataaaggaagtaccaagatcctattgtggccgggcgcggtggctcacacttgtaatgccagcactttgggaggtcaaggtgggcagatcacctgagatcaggagttcaagaccagcctggtcaacatggcaaaaccccatctctactaaaaatacaaaattagctgggggtggnnntggcgggcgcctataatcccagctactcgggaggcttaggcaggagaattgcttgaacttgggagggggaggttgcagtgagccgagattgcatcattgcactccagcctgagcaacagaataaaacttcgtctcaaaaaaaaaaaaaaaatcctgttgcatcttcaaagatgagaaaatgtgcgtgtgtatgtgtacttgagtatatgttcattcctatctccccatctatctacctgcctactgatctctttctagcccggtcagaaaattcaataggaatcatggcttttcattgggattccccatagcacttgagctcagctgctagtgttgaagacatcactcaaatttgtcttgtttattctcgtagccaaacataaaaatgatcattacctacataaactaacctagatgatcattaattgaggctatttaataatgatctgcatgtttgacaatcaccattgtctaagaatgggccatggctttaggaatgtttcattcatttcttcagtctttcagtcaacaaataacacactgtcctaggtgctggggacacagtgtgagcaaagggacacaattctcatggtgccacatgggcaataagtaaaaccgaaaaataagaacgtggcagacaacaaaatggataacgtagggtgtaactggggaggatggtgatatggtttggctgtgtccccacccaaatttcatcttggatcgtagctcccacaattcccacatgtcatgggagggagcgggtaggatgtaattgaatcatgggggcgggtctttcctgtgctgttgtgataatgaataagtctcatgagacctggtggttttataaaggggagtttgcctgcacaagttctgttattttctcttgtttgccgccatgtctttcgccttccaccatgattgtgatttataattttctttataaattacacagtcttgggtatatctttaccagcagcgtgaacacggactaatacagggggaaggctagtttaaatatgagtttcacaggacctgtttctttggcttgaggcctgtgagatgaggagccagccctgagaagtcctgaggaaaaacttggagacagaaggaagaacaaacggactcctctcccactgaatgacctcatgtatatgtttgccacttgggactatgacctgatgcctctttaaacctctaggtcattgggaacatccacaaaacagctgaaagatgctgttttgttagaatgctcgttgtaatgcaggatgctggtgaacccagtgtgaacttttcaaaaacctattgatcccaccccacccactctctagagctctcatattgacaaaggatacctttcacagattagaaagtcagtagactccatttcttagaggaaagttgtggaaaatacttaaaaatactgtgagtagaagaaagaagcagtttagagcttcaaattcaatcgggctaagttgggcaagctactgccttataggcagtaactttctcatagaactttaaaaagttttattttgcaataattatagacttgtgggaagttgcaaaaatagtacagagagggcccatgtactcttcatcctgcttcttgaatggtaacgtcttgcataacaatagtaaatggtatcatgtatatagcatcacattatcaataccaggaaactgacgttagtattaggccttaaacagatttcaccatggtttatgtgcactgatttgtatgtgtgtgtgtatctcaccccatgtctagattcctgtaaccaccaccgccatcaggacacagggttattccatccctaccaagaaactcccttgtctccctgtacttttatgtatgagaaatggcagcagatgctgtcctgcttttagtctgaatcatattctggaaaaatctacagtgagagaaggtggatgagtctttgaaatctattggttgaaatgtattggcactgagaatctgcttaattgatatagaaatggagttccttggtctgacttatatgaagaccatctacaagctcagaaccaaaaaacacaggtttgaataagtaaccctgaccacattatgagagtccatcagttgatgctcaattggtttaagaagctaataccagtcatgtggcctgagtagtttatttctaagaagaaaactctttctggcaccacacaacttgggggattaataatatatatatggagcgtttggcacatttctcgaagatgacccaggaagcagacacaccagtaatgggttaacaggtcacccgaagagtgggtgcattccttatggaaaacagaacacatgatagaaaaatagccttttgtgtgtggaggcaagaaacctttaggacgtgcagttagcagtgagaacttaaggaaggtgcaggctgaaatggaaacacgctataaacagattgagagagagacaacagctttaagggaaaacatctgtctggtggatctgacatccaaaagttgcatctgtggtctaggaccaatcttgtaacgcttaaaaaaggaatccacagaggcccaaagcgggctctgaaagtttctttctttccttgagattttctgtttgctctgcccagaatactgcctaggacggatgaaatgaactcatctggtcctgtttctcaatgctgaagtagcacgccagagaagttaactttagaacagttggttgcagcaacattttacctggattattctagacatactgataaggggagtccatttactctgccaaacgaaacttctggaaatctttttttttaaagacagtcttgctctgtcacccaggctggagtgcagcggtgcgatcttggctcactgtaacctccgcctcctagattcaagtgattctcctgcctcagcctcctgagtagcaggaattacaggcacccgtcaccatgcctggctaatttttgtatttgttgttgttgttgttgtttttgagacagagtcttgctctgtcgcccaagctggagtgcagtggcgcgatctcggctcactgcaacctccgcctcccaggttcaagtgattctcctgcctcagcctcccgagtagctgggattacaggtgcctgccaccacgcccagctaatttttgtatttttggtagagacagggtttcaccatcttggccaggccagtcttgaattcctgacctcacaatctacccacctcggcctcgcaaaatgctgggattacaagcatgagccactgtgccgggcctaatttttgtatttttaatagagacgaggtctcactatgttggacaggctggtctcgaactcctgacctcaagtgatccacctgctgtggtctcccaaagtgctgggattacaggcgtgagccactgcacccggccgcgaaacttctagaaatcttgagagtgactcttccaatattttgtatttcaagtagaagttttcagtaataatgaagttgaaagccagaagagaggagcagataatgttctcatgaagcctcagaagacattaggagcatctatctcgatattagattgaattgaaaatttgtcatattagtcccttgacttattcatattttttctcttgagccattggtttgtgttctgtaaacacagcctaagaggctattttaaaggaaatggagatcaggtgttctccatagattcccatgctcgatttcccggagtgggagcaggagagaattatgagcaaagagtttcagccctcaccctgggacattacccctcctccctgcacagacttcacagtgggatgctggtgaattttttaatgttaatttttatttttaaatttaacttttattttaagttcagcggtacatgtgcaggtttgttacacagataaacttgtgtcatggggctttgttgtacagattattttgtcacccaggttttaagcccagtactcattagttatttttcctgatcctctccctcctcccacccttcatcctctgataggtcctagtgtgtgttgttcccctgtatatgtccatgtgttctcatcagttagctcccactaataagtaagaacatgcagtatttggttttctgttcctgatgttagtttacttaggataatggcctccagctccatccatgttcctgcaaaagacatgatctaattcttttttatggctgtatagtaagtattcattccatggtgtatatgtaccaaattttctttatccagtctatcactgatgggcattgaggttgtttctgtgtctttgctattgtgagtagtgcagatgctgatgaatttgcacttcatattcagtgattttcgccttgaagaacataccttacccaatccatgttacttgaagacgaccgtaactgaggtgtaggaatttgtcctaaattactgtaaacaactttttggggcatttcacaatattccagcgcctctccgttccctttcattgtcttctccacctgatccctctttcaaactcttgtctttatttttatacatcttaccccaaacccagattgcagtaagattcctatgtgcattgccacatgcattttcagcaatttgaaattttatctaatatcaattaagctggtataaatcataccacttcacatacgtgaagttgtttgctacagccctgttctggagaacggtgagaatgccctccttgttttgtggcaggggtgaggggggatgttttaatgaggagagactggtaataagggattgtggtgaactggcaggggaggaaattcaataaacagaagagaggaactcaggatagttgggcactnggagtgttgcaaataaagcaatatgtgatgctctccccatggaatgctcacctacgctatactcagaatccctgacagccgttttgcactctccaacactggcacacaatggggtctcagggtttgttgaaataaattgggctctatatcatgtgttccctgatttctcctcaataatgtgtgcttcccagccctgcattgaaaattaggacatcaagtgacattgaagtcagataatctgcctcatgtcacatgggttgaatgtggtagatgtgatctcaggtcttttgactgcctcatggcaccttccatttccaagcctctgttttctcatattcttaaggcacagaattcatcccattacttggtctggtgttgaggagaagcttggcataatggaaagactcaaatttcatttttttttccttcttagaagaaatctgtagaactgtttcatcacaacctgtggatagctgacgcagtttgaagatctacaccttggagtcacccatctcacaaaatgtcagccggggtgctcattggtacattgtttgttgtatatttcctcataccttggaaaggactagttgaatttgttccaaaccaagcaattgacctaggactttgcatcctattagtgtcggccacaattcaaatccaactccttttcaaagttgtattttttacgaaaggtgacctgatagcgagacaagagtaatgacgggtgaggcactctcaaatcaggccagggtggcaggccgggacatcttgttttcatcagattctcgtagttactcttgacttttctgtgtgtttgctgaacttgtgagattctattgtgctctttctagctggatattttccagagggttatcaagaaaaaggagtatcttctgcattaataacctcgggaaggattttagcagtaaaattagagaccagatgatctgctggacagcaggatgggggagcatttcttcccctttcccaggagagtgtcaagttcagcatgacctagcaccagacctttcactcagtaactctgagatcttatcatatcaagttatctcagtcatgatgacgtaaatggcaaaactactacccttatttcttgggataagaatttttcgctttaaaggaatacaatatacaaaataggtgaccatgaaatatgcttggtgggtcagctaatttccatatgtgctttgtgattggtttttaagtgaatttattgctatagagttccaaaacaaccctttaacatttatgttttctgcactttgtctcattattgaaaataacaagcgctatgtaaaagcgtaaagaatatactgaggtttacagcaaggataaccaccaaagaccgggagttagaaagctatggcctgtgggccaaatcttgctcaccacgtgcttttgtaaataaagttttattggaacatagctatgcccatttgctatgtattgtctatgtctgctttcacactgcaacatcagagttgagtaattatgatagagaccatatggcttaagatatttgctatctggtttttcactggaaatgttttccaacccatgctatagatattttcatggtatttatttactgactcgtttgttcattctttcagtggacaccaaccctgttaatgacgctggggaatgtaaagataagtacatcagtctctaatttccaagagcttataatgtaacagagacaagttatgtactcaaataacagagacaagtcatgtattcatctttacctctgaccaggcagaatgcagcacgtactacagacaagaaatagctaaattgctgtggtagtttagagatgatgagagcctccgacaaaggcagggaattgggaaatgcacaaagatattgcttccataactgtggcacacagtgatttcccaatagggaacttcatgagaaatcaggctaatttccttcatggaattttataaattgtagtatccaaaagagtggaagtgatttagaatattactttgtgtccagattcctttatctagaagcatatttcccctgtaactatggggatgatcatatttatagaaaatttttgaacatttgaaggaaggcttcctttatcagggtgggaagacagaaggaattccttttcttttttgctgattgttcacttcacagtgtaatattaaatgctatgggtcttaaagaaaggcttctgtggggaaaccctcaaatatcaagtggactataaaaacaagataggctgggtgcagtggctcacagcggtaatcccagcactttgggaggccaaggtggatggatcacttgagcccaggagttcaagaccagcctgggcaaggtggcaagaccccgtctctaccaagaaatacaaaaattaaccaaacgtggtggcacgtctgtagtcccagctacttgggagtctgaggtgggaggattgcttgagcccaggagggagagattgtagtgagccaagtttatgccactgcactccagcctgggagacacagcgagaccctgtcttaaaacaaacaaacaaaaaatcaagataaaattatagaaccctaaccatggaatagcaggactcagtgacaattacatctctctcttctccacaatgcatgcgagtgtgaactgagattttggtaagttcccatttccctttggcctattgaacccctttaagggttcagcccccaaccctgggaagattccatgcatgaaaactacccaaatcctcccagttgggattaatgtgacctgataaagagttctgatttttttttttttttgagacagagtctctctctgtctcccaggctggagtgcagtggcgcgatctcagctcactgcaacctccacctctcgggttcaagcaattctcctgccttagcctcccaagtagctgggattacaggcatgcattgccatgcccggctaattttttatttttgtagagacggggtttcaccatgttggccaggctggtctcaaactcctgacctcaggtgatccgctcatcttggcctcccaaagggctgtgattacaggtgtgagtcactgcgcctggcctgatttttgtgtcaccagaattgccttgtccattatttgtgttttccaaatatctattgaattaactcgaattggatgcagacagacattgtgcactcaaaacctaggtgattgatttggaaaaagattcaagacttttaggttagtctaagagatgctcaggggaggccccttccattttgcttccagcagggtgtcaaagttattggctaaattccagcctccctttctttatactcataacaataaaggtaccagcatgaatgcagcagagttttgttttagaatataatcctgtgaagttttaccagccgaaagcataatatttggatggataaaatgtgtgtttggtgagaaagctactgaaggaacataatattggacccccaatcaggtaatttaaatgttataggaagcaccaagcccacctatttcacaggcccccgcctctcccctacccggagtagcagggctcccgcagttagccatcccacagctctccaggggctctgctctctcgttaccaagaagcacatgccagcccgtctcccagcgtttcctggtcctttcacaatagacagatggggatgctccaggtagagacaaaagagaacacacaatccatacgctcatcttgctggtacccttccgctccctgagcccaaagaggagaacccagccctctgcgtaggaagaacacatttcaaggcatttactgacaagtaggtatagttactgcatacacatgtggaggctgcattatatcaaaactgtaaataaacatagactctgcacactccttcaggccccaccatgtatttatgaatgggattgcttcatcattttcttttaatgtcagtagcagggaagtcagaaagcattacctctaaaacggggacagaacattgcaaatacatacatttccaaccagctgtggcaataaccagcaaacaaaattacttcaccccgttgttatgggccccatgcctatgggatttttcctgagtttctgatttataacaatcacttttgaaggcctcaaaatgcttaggtgagattaaattactgattatccaaaagttctgttttcgctggagtctttctggacggctgctgattcggtcccatttaaagcattcggtggcatgaactcactcggtttctgcccacatcactgcattcctgggatgccgttcacaggccttagcaagatcatctgacagccgcctgtgaggtcaacgaactttatacataattaaacactcccagttaggagaattcatttctttctccctgagaagcagagaaagaatacatgttgtgttgccctccattacggagtaaaagttgtgtggagtaatcaggctagtttcacatgatttaatgttgaaccgaataagaaagtgattgcatcctctactgggcctcacagaaaagtcaccacccacattgtttattcagactgggatcttggccatttggggtttaagccagaagaaagaggaaaaaaaaaaaatccaaccctggaatgaacgcttttgaaactctgtattcttgatgaaatgcggccaagggttcttttaaaaaaaactatttaaaatcaattaccaagatcatattttcatttacaatgggttgttagcaacagctaattctctgtttccatccagatttggtgtttaagcttcaatatgctggtattggaatccttgccgtgttttgtctgggtatcagatgctaccaccaaactatgtgtggggagttgggcaactctgacctttgaccagctttccataaaataacaaggaaaggtgtgaggaggctagggattgggtgaaaactagcctgagggatggcagtaagtgagcttcaccagggggatgaacatataaaggaggcactgaggatattgctaagggtaagagaaagcaaaagacagaatcatatgccttgggaggagggtcaggcccgttaaggcacctagtccgtctgtctctagccaggactgcaagaaatcatctcagacatgcgatcttgtatcgcatttttaaagatctcaagaggagattccggaacctcccttggtcatccgccctattatttaacaattcctacagccaggaaattctttcttatttccagcctaaaatgtgcatgtggtgcagcttcaggggaggtgattgatcgaggccacgcccacctcccccccgcctgtttactccttggatgggatggtgcatatgtcttgcttcttccttaaaatgggcctctctcggcctccataccacagtccccgggctgggagaggggtcgtggtatagaggtggggtgggggccgaccagcggcgtttatggggaccagccgccaccaggaactgttgctaggcattttatgtatttcccagaggcaagagaacatagctgtgatgtggccaggagtgcgcctcaaaaccacgtgcaaataataaatgcggaagctcccgtttcagattttaaaagaaaagaaaagaaaaaatcctgaaaaacagaatgaagagtctagaatttcactggcctcgagatggtagtctactcctcaattttaaacaagaagagcccagagcagaaaagggacctgtcccggacaagatctcagagctaatgcccctaaacgcagcgcagtgccctgttcttaatttagatagggtgctggaaaggcgaaatcatgctggaacggaggccatcgatctcacttcctccggccccttcctcctcttcggcagatgcgcagtgaatggtcaggccctccgtgagtgaattacagattcattgaagagccgtcagatgactggagcagtctggtttcttccctttttatcgagttctgtcattgtgttcctcaaactgtggtttgttccagaaaggaagaggttgtcttcttcacccgcctgccctaagttgcgtcaagttccagttccctgtattaagtaaattactaaatgagtggaatgaacatcataatgtcaagggtagggcgttgacattatgggacaatagaccacgagcccactctgtcagctttttgtcccgcacctctattatctgtcaaatgatcatattaacactctcctacctactttagggggctcctaaaaacaaatatttattgacaggttatgtattagtctgttttcatactgctatgaagaaatacccgagactgggtaatttgtaaagaaaaagttttaatggactcacagttccacatggctggggaggcctcacaatctgtggaaggtgaaggaggagcaaaggcacgtcttacatgagggcaggcaagagagccatgtgcaggggaactcccatttataaaaccatcagatcttgtgagacttattcaatatacgagaacttgggaaaaacccacctccatgattcagttgcctcccaccaggtgcctcccatgatacgtggggattatgggagctacaattcaaggtgagatttgggtggagacacagccaaatcatatcatcttataaatgtagaacacaaactccatgatatcctttatataaagtttaaatacatttaaaaatatatatatatagtttaaggatacacacatgtgaaagataaaaccatgcatggtgataatgagcattgagcatcacacagtatttttttattgtgaaagatctcgagcaaacagaaaatgcagagaataagattgtgtataaatgtgcattcaccactattttgtcatgtccttgttcttttttgtaaaaaagagatagactttccccatttccacccgctttttccttccctgaacgtcacagtcatcagtttaaatgtgatgctcaatgctcattataaccatgcatggttttatctttcacatgtgtgtatccttaaactatatatatatatttttaaatgtatttaaactttatataaaggatatcatggagtttgtgttctacattgtatttgtaagatttgtccgttgcaaaacatggacctctatacattttccatgctgtgttgtagttatcagatggaggacatggaagttatttctaattttaagatgtcctttggaagaatgctacaggtgtgtctagctttttgatatgttctttgcacaccatgcctggtagtttctcttggatatgtagccagtagcaaagtgatgaattagcacatcgtcttccctggatgttgccaaattgctctccaaagtgcaagccccttctcagcagcagggtctgagaattcctaatgctcagtattctcttcaatacttgttagagtcatatttaaaaatttttttcctttgccaatctgatagttgtttcaggtttcagttgcaatttcctgattaccagtgaggttgagcatattttcatttgcataccgagtagtcaggatttcctccatgagttatctctttctttccttggcccgtttttctattggttcgttgtttctttattggcttattggagtatgtaatgtatgcttgacaccactcccttgtccattatatgcacagcaaatatcttctcttggttttgtaattttattttgttgatgatggtctgctaagagattttcattattccttttgttttattctcataagagatctgtgagctagatgctatctctgtttgcatttttagatgaggatagtacatcttagagagtttaagtaaattgactaaggtctcacagctggtaagtagcagagctgaggatcaagtccagatcgaattccagagcccatgcgcttaaccactgcctctaagtcataactactatgagtatccccattttacagatgagcacacagataaggcccagagaggttcactgatttgctcagagtcactcagcgtggtagtgttggaacaaggactgttcctcaggtcccagactgccaacacaactgtatacctagattgaaatgttggggaaatgatcggtgatagactagataaaggaaatgtgatacatatacaccatggaatactacgcagccataaaaaggaatgagatcatgtcctttgcagggacatggatggaactggaagccattatcctcagcaaactaacacgggaacagaaaaccaaatactgcatgttctcacttataagtgggagctgaacaatgaaaacacattgatgcagggagggagacaacacacactggggcctattggagggggcaggaggagggagagcatcagaataaatagctaatgcatacggagcttaatacctaggtgatgggttgataggtgcagcaaaccaccatggcacacgtttacctatgtaactaacctgcacatcctacaaatgtatcccagtgcttaaaataaaataaaattaaattttaaaagaaaaagaaaatgttggggaaatgtgcagaaaaagatcatgtatacccttttaaacagtaactttaaaaattatgaactatttaatatttaaaatacaaaatttacagagaataatatagcaaacaatcaggtaccccaactcagatttaataaatattgacattagccacattttaaaaatattttttaacagaaaatgttgtagtttaagcctcttttgtgaccccaaactgacagcattcttccacagctttcccagcagtaaacactctttagaagttgcactgttacatacctgttgcattttgctatgtgattatgtgtcataagccaggggtccccagcccccaggccatggaccggtacaggtccgtggcctgttaggaacctggcagcaccgcagaaggtgagctgcaggagagccagcatgaccacctgagccccacctcctgtcagatcagccacggcattagattctcataggagcgcaaccctattgtgaactgtgcacccgagggatcttggttgctcgctccttatgagaatctaatgataaatgtaatgtgcttgagtcatcctgaaaccatcccccacccccgtctatggaaaaactgtcttctattaaaccagtgccagaaaggttggggaccactgtcataaacaataactagtatcattttgcaagtttaaaaaacgaatggtaatgttatcaataatccatctttctggaacttgctttatcacttgaagttatgtttctgagatttatcctaattaatgtatgtagagctaattcctttaactgttatattgttataaactgaatgtttctttccctgcaaaattcatatgctgaaatcctaatcccaaatacgatgctattaggaggcaggattttggaggtgattaggtcacaagggtagagccctcatgagtgggtttagtgcccttctaaaagagaccccacggagctctcttaccccttcactgtatgagggcacagtgggaaggtcctctatgaaccaggaagtgggtccacaccaccacatctgctggctccttgatctgggattccatccttcagaactgaaagataaatgttacataagtcacccagtctatggtatttgtgttatagcaacctgaaaagactcagacataaaccaatttctttctataaatatatcataatatatccactccctaactgatgtttccaggttgtcattttataaacagttctattgtgaccttctctggacttgtttccatgtggatttgttgaacttttcaaagatacagaagaagtggaattactgggtcttggggtacaaacatcataaaggttggtaggcgttgccaaattgctctcagtttgctttcagcaacaatgtgtacaattcttattattctgcatcttctcccactcttgacattgttgggcttttaaaatttgctaatctgatgtattgaaaaggtatttaattgtcttgatttgtatttctctgattacttatgaggttatgtgtttagtgttggtttttcctacggtttttcatcatttgggatttttttctttctctttgtattacctgactctagactttgctcacttttttgtagtgggttgttttttccttatagagtactaagtgttcactaaatattatgaatacttacagaaattttctctctccaaggctatttattgcctttaaacattgttttttggcatccttcatcacagaatgtttaacatcaaatttctcaattttatcttctttccttcttcttcttttttactttatggtttgtatttttttttgtcagtccctcacttaagaccataaaaatagtgtctaaaaaacattttttcctaaatgttttaaagttaactgtaattctcttggaattcatttttggatatagtgtgagttagtgatctattttttttctccatatgggtaacagttgtctgcgaaccacctattagtttagtttttgttttccccatagtttgtaatgctatctctgtcacataccaaattcccacatgtgtggggctctctctattgcgttagtctagttatctatatttacaccaatactatagtgtcttaattttatggcataattaagtatattgtatatgtcttgatatctggtaggacaagtccccatattattctttttcaaagttatcttggctgcttttggaccacaattttaaaaccggttacaaatatccatgaagaaaacctttctgggatttttatatgaatttcattcaatttatgtattaattttaggggatttgatgttgaaattgtggaatcttctcactcctgagcatgagatatatctctgtttatttaggtcttatgagtttcaatgaagttttataatttttttttccatataggccttgcacctctttctttagatttattcctaggtacctcacaggtgtaagatctctattgctaatgacatcttatgaaaattacattttctaattggttgttactgatgccatggatgtttgtatattaatcttgtctccagcgtccctgccaaaccctcttatttcttgtaattgttcatagtttctcatggattatctatgtagacaatcttatcatttgcaaataatgccacatattcccccttcatttctaattctgattttcttactcctttttcttgctttattacatcagcaaggtatctcatacaataatgaatagagtggtgagagagaagacatatttatctagttgctgattttaaaggaaatgttcctaaagtttcttgtaggttcttaggagaaacttccttctgtttctgttggctaggtattttattttatttttaaattgtgaatgggggttaaatttgttaaatgatttttctgcatctattgagatgattatatggtttttccttcctaatttgccaatgtggggaattacattaagattttctaatgttgactcttacttgagcttctgggataaaacctactgggtcatctcacacacattccgtatatttattgtgtgataaacatgatattttgatagatataatctcaaatatgtatattaaagaaatactatatatttgtgcacacactatactgctggaatttttgctaattttttttttcagattttttgcattgatactttaactgagattgaccaatacttgcctttttttgtattgtcttagtgtttttctacaatgtaggtttagactgaactcataaaaatacattcaggattctttgttctttttccatatttttatgtgtcaactttggtaacatatttttctaaaaggttttccattttatctgtttttagatttattgctttaaaatacagaaaagaattctcatgctttaaaatctttactctatttagttatgacccattttatgcctaatagtgtttatttgtgctctttctttttccttgctcaatcttgtcaaatatttacctattttattagtctttttaaagaatcagcctctattttgtttctattctctattgtttctgttttgattctattgatttgttgtctttattattgccttcctgctactttaaccatgtgtggaaaaaggattttcttctattgtttttgagtttacattgttgccctttctctaactttcttaaaatttttcttgtttactaatattaaattcaatgctaaacattttcttcaactgaaatttagggcttcagttgttcagtcctaaatatgttttactttcattttgatttcatattaataatttagcagtgtgcttctgaaatttcaaaatgtacttgggtttagggattgtggttttatctatctcaatttttttattgtattttggttgaagaatgtggtctgtatgataacagttctttgaaatttgttatttgttctgtggcctggaacctgttcaatttttatgaacatttcatgtgcattctctatttattgggtagagaattctcttcccatgtcattagctgaagcttgtataatgccttatttcaatattaaatcttttcccttttttaaaaaaaaaacttgagctgtcaatttcatagagatgtgtactaaaaatctcccactatatgcttctggcagatcatgtgtgttaaggaatcacaaatgtggtaaatgaaacagcatatccaaggcacccatccttgcaggaggataaagaagatcctcatggatgtgacattttagctgaacaggagtaggccaagaaattcttgcattgccatagaggaacaccggagactgggtaatttataaacaaaagaggtttaattgacttacggttctgcaggctgtacagtcatggtgccagaatctgctcagcttctaggaaagccacagggagcttttactcgtagcagaaggtgaaatgggtgcaggcacatcacatagccagagaaggagtaagagagaggagacggggaaggtgccaaacactttgaaacaactagatgtcatgagaactcactatcacaaagaagacaccaaggggatagtgctaaaccattcatgagaaatccagacccatgatccagtcacctcctccttcagcattggggattatatttcaatatgagattcggggggacaaatactcaaatatatcagttaataacagaggacttcattctaaatgcaaaggcacacaatcacaccacctaaataccactttcctgtattctattttcttgcatatttttgacattttcattgaatacctcaatttttaaaataataaattgaatacatgtaaaatgattttcttctatttttaatgtattaagttcaatagagacataaaaaataaaatataaataaataaataaataaaatctcccactataattttgaattgttactttcttgtagttaattcaatttttgctgtaaatatttgacactgcgtcatgaggcatacaaaaggattctggtgaatatatcttcatattaacaagtgatcctctttatccctcaaaatgcttttggctgtaggccgggcgtggtggctcatgcctgtaatcccagcactttgggaggcagaggcgggcagatcactcaaggtcaggagttagagaccatcctcgccaacatggcgaaaccttatctccactaaaaatacaaaaaaccagttgagcctggtggcacatgcctgtagtcccagctactcgagaggctgaggcacaagaattacttgagcccgggaggcggaggttgcagtaagcggagatcatgccactgcactccagctgggcggcagaacaagattctgtctcaaaaaaaaaaaaaaattgcttttggctgtaaagtctgttttatcagatccgttcatttattcattcactgattcaattaaaataaacatttattgaacatttattgtttttaaggaatgtcctaaacactggagatacagtagtgaacaaatgagaaagtccctactctcttggatctgagagatcttatattttatttggagatcacagataataaacaaacaaaatatataatttgtcaggtggtatagtgctataaagaaaaataaggcaaggtgaggtagataaagttatgctggggggtataaagttatgctgttctatatcatgtagtcgtgggcagctcttggattagttgacacttgagcagaggcctgaaggagccacctgatgtttatattgcttatataaactgaatgtttgtgtcccaccaaaattcatacgcagaagctccaacctctaatgtgataatatttggagatgaggcctttgggaagtaattaaagttacattctctactgtgtattccatgcttattgggtggagtgttctcttcccatgtcattaggtcagaacagcagggccctcacaatggcattagtgatcttttaagaaaaagaaggaagagatttttctttctgtatgtacacctgaggaaagaccatgtgaggacacagcaagaaggcggccatctgtaggccaaaaagagaggcctcaccagaaatgaaatcagccagcaccttgattttggacttaccagcctccagaactgtgagaagtaaacttctgctgtttaagacacctggtctgtggcattttggtatgacagcccaagctgatttgtctaatgactataccaagttcttgtgagcatttccctatggtattgctttctcttcctttatgttaatccttgtgttttaggcttctttcttgtaaagagctggagttttaaaaaatccaatctgaggttttctgtcttctaacaggttaaagtcatttatatttattatgattactcatatatttggaattcactaggagcctgaatgttttctatataccatgctacttctttacttgttttttcttcttattctgcctcacattaaattacttgactttttcttacactgttttccactgatttgtaatgtatacattttgtcctattgttttgacagttgttaccctcaaacattaaaaattatatttgagagctgggcgtggtggctaacacctgtaatcccagcactttgagaggctgaggcaggcagattgcttgagtccaggagttttgagactagcctgggcaatacggtgaaaccacgtctctaccaaaaatacaaaaaattagccaggcatggcatgcacctgtagtcccagttcaaattccttcttactgaagtacatccttgaatagctatttcattaaggatttgggaatattaaagcatctcagtctctgactgaaagtatctttaattcactcttggtcttgaataataatttttctaggtatagaattttacatagatatcttccctcagcatttgagtatattatttcattaccttttgatttgtgtaattgataaggtgtagtctgcttcaggctgtcatttatttagagggttctctctctctctctcatattgctttaaaatttttttttgtttttatctttggtgatctgcggtttcaccacaatcctgcttgggattcaagactaagaattcctgacattcaccgattctgaaaaattttgtcctagtctctgaatattttctctcctcagtcctctatttatctatctgagtcctcttttatatgtatattggaccttgttattctctttttcatgtctctgaatgtgtttttcagatttctcatgtctctcttttttgtgttctatttttttctttaacatctccctaccttttttattcctgtccctccaaggtaaccaatgttaacacttggtatgcattcttctacatgtttctccaagctcctataaacacatgcacatatatattcatatatatcttaaataagggtgttttgttactgttgtttgcaaaaaaaatccaatcatacagcatgtattttttcacaacttgtttttctctcttgatagtacatgaaggataatctccagataaatggatacaaatttaattcatttttaaaaatagctaagtaaaattccatgttatggctatattatagtttattcaaccttctccctattaatgagcattcagattgttttcagttttatgtcactgatagggacaggagacagggaaattctgggcagaagagggtgggtcccagtgagggccccanccctcaagctgaaaagcctgataccatggtccaaagggagaatttacatccctgttttcccactcgaatgttgccttttccaaaaccacccatggcctgccctgcctcccatcctgagcccataaaaaatccctggctccactggcagagagaagagaagcagctggatgttgaagactacagttggacgttggagagaagtggcttgagttcagagggacagtttgacggtgtagcttcagacaggagtttggccagggatggctggacttcaggggaagattaccttccatccccgtccccttttcagctccccttcctactgaaagccactttcattggcagtaaaatcctctgtatttaccatcttcagtttgtttgtgcgacctcatttctcctggacgccggacaagaacttgggtgccacaatgcaggtgtaaaatgctgtgtcacactgaccgcccccactgagctgttagcacttaaggcgtccatggatggcagagctaaaagagtactgtaacctgtcctcttgggcttcaggggttgcaggcactgctccagacgctgctgtggggctggtatggaattcgctccttccagcacccaaaaagcactcacctggctcctgcatctactcacctgcgtgctccacctccgtgaggggtggagtgcagcatgtcttcatgagtggagttcacccctgccagtgccagagtggctggcaagttccagcgcccatgcactccagttcccacccatgaagcgttcagggaaataatcctgcttcatcaccacaaacattgtggccataaacatccttgtgcatatttacttatgtgctggttccttaatttctgtggaagccaattcaatgccactttacttaccccagtccctattctcaaagaatataactttgtatattttagctttttcttctagcatatatatgtctctgcatttctaaataatgtatatactgttatcttttgtttcatcaattttatgtatatcttaaccttatattatagtagataaaaatttacctgtctgatatgatcatatccacagcttcctctcccctctttctcccagtgtagttatattacaatttgggggtaaatcagcccctagtgttttcactattttgtcaaaataaatggcattaacagctaaacctttaacaatgaagttaatatctgtctttttttcatgtccttaattgatctttgtacctggtacagacttttcctctatcttccataggctcacagtacctttttccacaaagctgatcacattagtaatctgtcagttctccttcttttcttggtgatatctctgctggagacctacattttccttctagctagacttctctctcggcctgctagatagctgacatcctgagatttgtcttcactgttattctagaacttccctttgccttttcttctgtgttggattctctctcttgttttaccccattgtttgaggaagcacagcctccagcagctatcagaattaaaacctggtgcagtggtaacagccttcatatgccttgctcttggtctgctggccctgtctggatgactggtcctgtggctgagccagtcatcatcctggggtatctcacttcagtgccgtcatccctctgttgtggtcctgtgttagttctcataaaactccctttacactctctcatttctgtggctcccagcttacagtagcctatggaaaatggatccctgagagacacattcacacttcacatgtctgaaattgtcttcattctgttgtgtcacatgatgacttgtctgtcttgtacgggaaaatccaggttaaaaaacagttttccccagaagtttgaagatattgctttattgcacgcaatctcccaatgttgctatcagaaagctgccactgttctgattcttgatgttctgtgccttaccttatttttcttttcccctggaacctctgatttttcctgtccccctatattctaaatttcacgatgactgttctaattgtgggtctgttttcacctgttgtactcagtgatcattgtggtctttcaatctgtcaagactgtgttctctctgtaagctgctctttctttccagaacttctattatttgggagttgaacttcctggacagttttgtgattttttcatattttctcacctgttttccatctctttatcttttttcactctttttgtacaatttctttaacttcaatttccaacccatctattgggttcatttctgttaccgtcttaagtttcctcttttcatctataaatagttttttaagcattctgttctgttttcaggatgtgtgtcattctcttagttttctgcatttttttttcttttcagaaattgtctttgcctctcctggtctctgtctcctccatgttgtctttttcagtctgtttgttttgaactctgtctttcctgtagagactttccttgcatgtcgggcagtcctgattgtctgaccatatttaagaatgaataacagatgtattgaaagctctgaggatgcgtgagggacttgtcaactctgagcatcactgtagaataaaatgtttctgtcataggttggagaactcctaatgctaacaactcctaaagtctcctaatgggaaaaccagggaatggtcagattctccagagaacactcttccagactcctggctgcaagatgccgccctgcctgtcccaggctgggagctgagatgaggaatgagactggagggttcagccttcagcatgcatatttccttttatttgatgtgtggcatctcccaattccaaaatcctctcccagagttcaaacctccagtattagcagttgtgataaaggctgctgcctagcagggtggattcaaggaaaggatccagggatctaactgattcttaaacagtttccctcacattcttctttatttattttttttttttgaaacggagtcttgctctgtcgcccaggctggagtgcagtgacgccatcttggctcactgcaagctccgcctcccgggttcacaccatgctcctgcctcagcctcccaagtagctgggactacaggtgcccgccaccacgcccggctaactttttctatttttagtagagacggggtttcacctgttagccaggatggtctcaatctcctgacctcgtgatccgcccacgttggcctcccaaagtgctgggattacaggcgtgagccaccacgccctgccctgttcttcttattttagtgactcatctcccttccgcacagttccagaggtcaccggtgctatctgttcctgagcctttggaggatccactggttgttcctaactttcctgctcctcactgaggattcagcttcctttgtctgttaattctatcactgcttctccatctgctttccgtcttctaaaatcttattactgttatttctaaaatcttgttacttgttaaacctacaacatactaaacaatcctggaattggttgtaaaagggtcatggattgccagagatcaaaaggtatttaaaatctcctctcctattgtcctggtggttttatgtcttttaaaaggtcatcttccctcgttacagtgacgtttcaggtgaaagccatattagatacagtgtgttcaattctccatttttgcttggaagtcctgtgttacattttggtttaattttctcaaggctgtcttccggttcactgatggcctgttttgtgttactctactgtctaacctttccattgagtgattactaggagttctactttattttttcaaatctgcttattctctttttttcatgtaatcctaattttctccttatggcttttagtctttatcactataatatttttaaacaatcttattttgtactccatttgagattgtatctttccagttcttaggatttaaagttttttttttccctttatcactgtccctcatggcagtttatttgtgtgtgtgttggggggtgatactggcagttcaacctcagatatttttccttttctttgtttcttttttctttctttctttcttttttctttttctttttttttttttttgaggtggagtctcacttagttgcccaggctggagtgcagtggtgcgatctcggctcactgaaacctctgcctcccaagttcagatattactcctgcctcagtctccctagtagctgagactacaggcatatgccagtatgcctggctaatttttgtattgaaatgggatttagccttgttggccaggctagttttgaactcctgacctcaagtgatctgcctgcctcagcctccaaaagtgctgggattacaggcatgtgctgccatgcccggcctcttttctataggaatcttgtgagtcctgagttgtgaaatcgtttctacatagtggacatatgtttgtcttttctggagatctaaggactttcaatgatcctagaactgtgtttgtattaatttattgtcatgggattcccctactcagatacacaggtagtataaattccgatcttacaactgaaagtggttcatgcttaaggttctgatttcccaaaggtgtcctgagctagggatacaagggaatgttctgctctttatctctgaggcagtgggcagagtgctttagtccaccttttcatggttagggtgactttttgaggctttgagatttaggaaaggggctcagttctggccccgctacctcatgcaagaccaaggtcatgtccctgcatgggcattagaatctcaccactattcccagggcttcgggagcatttgcgagagtctgaaacttccttgagcactgtgtagtcagccttacataaaagctctggcttcaattttatctttatttctggggcctctgtttctctcccttcctctatcccccttttccttccttttttccctttttttcccccaaacttaactctgtgatattttcttgggaatttcacatccttgtagtgggaagggacccatatgattaacctgttgtttgccattttgctgaaaatgaacactcacatctaattttgtgttaaacctggaacatactaaacaaacctggaattggttgtaaagggtcatgggttgccagagatcaaaaggcatttaaagatccgttgtccaaccctagcattttacttaaggaaactgagcctcaacactgataaaaccacttgcccacagacacgtggccagttagtggaaaaggtgggactgacctcaaagagtggtcacttttatctcacagcatcacaaggaggaacatctgacagcacttgccaggttatcaagacaccaagatccaatgcttgttgagccttaagtcactgagacattttggaaaagccacatataccatttgtgtttgtcttgacttgctgttgtgtttttctcttcttgaatacagagtagtaatgcttgttgaattatttaagtggcttattgctgtgccagtttgtttgtttttctacctttattttttcaaagaaaaacgcctttttttttttctccttgaagacatctttcaggatccatcacctaccggaaaccttccctgaagtctgaagctcttagagggtttttcaccttttctagctccttttgaaattgtcatttgaaccatgtcattagcaccatatgatgaattcatctgatcctctttaattgttgaatatgtatgtgcttcatctccccaagattgtaagtgctagcttgcagaaaccatggcttatatatctttaccattttccaaagtgttttcctgtggatgagttgatgacgaaaaacctagaggaaatatgttcttttagatagagcctgagtttggtgtcaggaagcctggattctgccccatttctctgctccctggtagacctatgcaaaccaccgatgttgtatggagaaactactggtgtctgacaatagcactgatacagtggttgtaaaatttttcatgcaagctgggacagttttcagagtgaaagggggcaatggtaataattgtgcagggacaacaggtataaattgggactttccctaacatgctgggacagacggtcaacttatgttctagatcaccttgagctcgtcagaactatttgcacagctgctcttgataccagtctttcaaacaaaaaattatcatcccttacaaaagttttcatccacgagcccaactttacaggtaataaaatttttagtttttccagacattcttgttttttcagctacttccatggctccaaatgcgcattataactgaagttaaactagattgtagatttgaagattagtactgctgagtaacaaatgccttcattcttctttatcaaccactctgtcttctggaaggaaataaaggccccgatttctggagttctgagcctacttttcttgggtgcattttgaaacatacggattttaccgctagtatattcagtgaggaaggaaggcttctgaaggattgatgatccccaaactggattatgtgttcatgataatggtgtatttggtggcctagcatagtgaggtgaggtaggtctttaaaatggctcattataaacatcattgttcctgagctcacttgcccttgcatctcctgccagagtgctttgtacatagtaggccctcatcaatgcttgtagattttaaattcggaggcacacttggaagacaatggtggctggtaaattaattatcagggttagcaacttcatttctgcttacgcttaaaaagtgctgcgtgaggaggctgagacaggagaattgcttgaaccagggaggcagaggttgcagtgagctgagattgtgccactgtgttctaccctgggcgacagagcgagaatccgtctcaaaaaaaaaaaaaaaaaaaaaaagttctgctgtggttgatacatggtgttggaatgcaaagaaaaatagagaagatccctgccctccagaactttgtgacctagaggcaactttagaaccataagccactaaaatttagaaagttcaggagaaaggacaatcacttttgacttggaggaatgaggtagcacttgagctaggtttgaaaaataagatttttctctaggactgaggtgagagaaggctgttccacatggtaggaacagcacaaacaaaaacctgcaagagtaaaattgcaagccatatttggagaatcagaaaaagcctggtatgttcagaagataagatttaatgatgttggtttggggaagttagaagtcctttaatgtcaaatgatggaactcaggttatgttatatagaaaatggagtcacataaagtgttggatgagtgcagtgatatcaaccaactcatgctttagaatgagaacctggttgcagggagaccagttaagaagaggcttaggtgttcaggagagatataaaggcaggagaagaaaaaggagccagaaatgagattcagaattggcagttgattgaaggaagggccaaggtggagagaacaaccaaacacaatcccaagggacagagtggatggggacgagtggagggggatgagtagatggggatgagtggaggatggggatgagtagagggggatgagtggaggatggagatgagtggaggatggggaggagtggaggatggggatgagtggagaatgggatgagtggaggatggggatgactggaggatggggatgatggaggaggggagatggaggtgggtgagggggannnnnnnnnnnnnnnnnnnnnnnnnnnnnnnnnnnnnnnnnnnnnnnnnnnnnnnnnnnnnnnnnnnnnnnnnnnnnnnnnnnnnnnnnnnnnnnnnnnntggggatgagtggaggatgggatgagtggatgggatgagtggagggggatgagtggatggtggtggagagacacagagaggatcagaatttgattggccaagactctggatttccagggaggttgtggagagataagatgaaatagtatgtgaaagaactttgaacaatgctttgcataaaggagatattcaatgaacattaaattgaaagaaaaagggaaggaacgaaagaaaaaaaagaaagggaagaaggagcttttcccttctctctacctctctgctgtgccccagtagggagagacattgagggttttaggagatctggtgggcatttttcctgggctgttcctaccaatagacttgctgctggtttcatgttagttaggtggcacaccaagaggggactcagaaagaacagaagatcagaacttgctggtgtcagacagaaaagacatgagcttgagccacatttgaagaaagaaagagaattgggttgatgaaaaggccatactgagaattatgggagtagaagttgtgaaggcaagaaggaagacggaagaaaacacaccaccgatgcagagaaagagaaggatgctgactgaccttggaggcagtttctgcatgttctggggcctatctttctatccttccctctatccctcccttccttccttttttccattcttctatttttctgaactcaactctgtgacattttcttgggaatttcacatcttcgtagtacaaggaacccataggactaacctattgtttgccattttgcttaaagtgaacactcaacgtctaattttgtgttaaacctagaacgtagtaaacaaaacctggaattgattgtaaagggtcatggattgccagagatcaaaaggtttctaaagatcactttgtctaaccttagcattttacttaaggaaactgaggctcaacactgataaagccatttgcccacagacacgtggccagttagtggaaaagctgggactgaactcaaaggatggtcactcttatttcacaacatcataaggaggaggcctgtcatttggcggtcagcacttgccaggttgtcaagacaagatttgatgcttttgggaaatgtgggtgaactattggggatcattggaaggagaacgttgcttaccttctgaccagcctatcctgaaactctgttaggaaaaccctactactctatgaaaacaaacccagtttctcctcatttttttcctgaccattgggaataacagcaagacagtccttttagtgattagaaaccaagtcacattgactttttctgacaagccactccaggataactctcaataaattattttattggaagtactggctggtactttgccttacagaatgcctttcggtttctttgtcttgggctttgattatttggtaaacatttcagtttcatgatgacgtggtgtttagatggcaatgcatgaattgcattactaaaattgtttgccttcagttatattacatctgcttcaggaatgctagagaacataaacacagtttatttactaaactacctcagttggagcatctgagagagagaaagcataaaatctggtggttggcatggcgtctcatctcgagtcagagaatcttgaagctgggaggttcttttggaagcctcctgctgccgccttcttcaacgtgatgccaccatcctccccctgaatgtgtctaacaaaaggcagttctcagaatgtgccaactgttagaagaaggaaaaccacaattgaatagaaacttttaaattaatttatcctaacatggatcgtagatttgttatgttgactgcactgcaaaacgaatcaagccagaatcacattggaatctttttttggtgtgcaaaatcccagtgtttctttgaggcagtgctttcagtggtgcacgtctctcctgtgcagaggaaggctctttacatcatcttagcacagtgtcttccacttctgtggtttctatcacttctattgccttttcccttggtattgtacctttccttgatatgggttccaagatgtagctgtacttaaagacttgatggtaaaaataggccagtctctaaagcaattacagttctctgtaatttttggatcctatcaaccagctttgacatttggttgaatgtgtttttgcagacatcagtgtaaactttacagagggccactgagccttagcagttcttcctaagcaaagtttcactcattctttttttttttttttttagaaaacatttaaggcctcctatgttcctttcagtgttcgctgtttcttctttatctggggtccttactgactcaccttgacgttactgattcataaatggattttcatttcttttgctgggggtcagcactttgatgattatccacttccacttccactgtgttattttttacataatatttttgttctggttacaaaagcaagatagaatttttgcagaaaaatccggaaaatagagaaaagcaaacagaagaaaaaaaaatcactcataacccaccaccaaaaacaaacaaacaaacaaaaccacagccctattgttaatatgttgataggctcctgtctttgcctagcacttagaaccctcctagtcaggttctaaattaactttacaacctcatctccctgcttgcacctcctctggggacatacattgcctggcataagacttttcatatttctctctcaatgaattttttctgattatgtaaataattcatgtggttgtacatatttccaatagtacctataaggaaaataaagtaaaaattatttttaaaaacatttcaccttattaaaaaaaatctcaccaccctgaaataaaagccattgatattttggggaccatctcaccaccatgtgtttatgtcacctccacacacatgatttcccataaatgagataggagcacccatgcggttcttatcatggacacttgctttcatttttcacttatttacttttttcctctcattcccttccctccttccactctaattcctctcttctagattgccagtggcatcagccttgtctgtgtccttccatactttatgcttctacaatcttaccaaatgttttgtagtcacaaatatatgttgtgattgttttttatacaaatcagatcatatcatatgtccctttatgcatctttctttttctcatttaacagtgatagattgctgaaatccctcttttgttttttcatgactgcgtactattccttgattgactgtagcatgaattattgaatgtagctatgacaaataatactgtaataaacatttctgtgcttacaggacgtgagatgacttgattaagaaaagaatagatttttagattggaatagacatttccagattgctttctaaatggcatggtgattcgtatttctaccagcaagtctttctgtatcttgccaagggacgatgcctctaaattgcaagaaagggtgggatgccttgtccatttgaaatccaaaacatcaagacaaatatggggcaataatatgaccatcacaataatatatataaaagagaattcattaagggatgattatcgctttctagagttgggttctggggaagtattatttatagaaatgagccttaggaggccaggcacactggctcacgtctgtaatcccagcattttgggaggcagaggcaggtgggtcacttgaggtcaggagtttgagaccagcctggccaacatggtgaaaccccatttactaaaaatacaaaaattagctgggcatggtggcacatgcctgtagtcccagctacttggggggctgaggcatgagaaacacttgaaaccaggaggcggaggttgcagtgagccaagatcgtgccactccactccagcctgggtgacagagtgagcgtatgtctcaaaaatagataaataaataaataaataaataaaaaagaaaagaaatgagccttagggcccgaaatgtaattttatttttagcatgatttttttttttattacccgacagtttttgattagtgtggcagctagaaatttccctcctggtttaatttgcttctttatagtttttgtcaaaagctcaaatggtacaacacatcacaggtgacttttcaacatttgagtcaaccttgaaaatacacagatggatggatgtcagggtgagacctgacttcaagttcccatgaatgtggtttatattttaaacactttaaaaataactgtgtatgtcgtggtgtcaggagtcaggcaggtggaagggttaggccttccaggccatcttccgagctgcaccggacgtttgtctcacctcccctacagagatggtggcacagtccaatcccttttccctcctcactgggtgtcctcctccaattcatggattgtctgacactttctgcactcgtccctgctgctggtgtctgctggcacttcctgtccttcttgcttcccatcttccttgtctgttctgcccctctcccttccatttctcccgtatttcttagctttatcacaaaaaggcttgggcatcacagccatggcccactcttgagattgcatttcttggccagcaagcccacctggcctcatcattttggctgcaacttcaaggtcatcagcccatcttagctctgttcatccctaagttttctgtggataggctttctatttgacagagtgcttctcccagccccctcttaatttctttatctgacactgttttttgggacctagaggtccctgagggcctggggcttccttgtgcgttgaggtgggccctgtagattctgccgtcgagagaactctgaccagcccgctctgagaaagaatgtcaagtggtcagggtctcaccaagcaaagggcctctatatgataatggtccacagagctgtcaggagaacaaatggggtaatctggagtgtgatttcatcattcttcagtgcattctcagtgccgggaaaagtcatgagtagggttctcgttttaactcctaaattatgaacttactcacatttgtggattagacaatgcctcaacatcattttcatagtgtgtgtgtgtgtgtgtgtgtgtgtgtgtgtttatgtgtgtgtgtgtgtgtggtttaatgtgtacaactcatctgaacccagttgctctgtggtttatcttttactgagaactgctttttttcttccttttctaagaaaatactagttcttaaagtatgaagtctttcttgtgagttcatcagcagtgaggggtgtggtgtgaggacctacattggtgataatgagatccaacaatcactgaattcaggcgattttgacacaaatcatattgactaaaataatattaagcacgtgatgctggtgacatttgaatatttgccaggaagaatacctgcatggtaacaattggctgcaaatggaagagatttgcatgttttattgtttttacagttttaacatacatttttattggagaatctgaaaccaacctatgtaggggaggttatgggagcaaaagtaacacagagaaccagcaggaatcggcctacctgcctgcctctgtcctcctctgctcctaagaatttgggtcacctctggcttcagcacttagtcctaatcatgaacaacacatgagttaggggaaaggtgtattcacaaatttgaaatttctttatgtttttcctctctcacattcctttcctgcagtctctttcctactttttcatcctttgtgtaaaggtagcaactttttttttgttttttgagacagagtctcgctccgttgcccaggctggagtgcagcagtgtgatctcggctcactgcaacctccgccttctgggttcaagtgattctcctgcctcagcctcctgagtaactgggactacaggcatgtgccactgtgactggctaattttttatatttttagtagagacaggatttcaccatgttggccaggctgctctcgaactcctgacctcgtgatccgcccgcctggatctcccaaagtgctgggattacagttgtgagccaccgcacccggccaaggtagcaacttttatttgagaaagcttggaatcctgacctaagctccctgagttcccactgtggcttgtggccacctattgtgatactcactctctacccttggttttctgatctctaaaatgagactgtctacttcacgtggctgttaaatgcatcataatttccttccttacctcccttctttaaaggaaacttggaattttcaaagctactaaatggagtttttttgtgttttttttgttgttgttgtttgtttgtttgtttgagacagagtctcgctctgtcgcccaggctggagtgcagtggcatgctcttggctcactgcaacctctgcctcctgggttcaagcaattctgtctcgcctcagcctcccgagtagctgggactacaggcgcccgccaccacgcccagctaatttttgtatttttagtagagacggggtttcaccatgttggccaggatggtctcgaactcctgaccttgtgatccacctgcctcagcctcccaaagtgctgggattacaggcgtgagccaccacacctgacctaaatggagtatttttagggccacatggttaggggcaactaaaaatgtcatatgctaccattgcattcatgaacaccatcctccctcagagaagaaaggagtcacatgactgcatttctggcgaaacctgattgcattttggtaaaacctgtgccaggaccaggacagtcatcaatgacgtgttccctgattttcatgactgaagagcttcaggctggtgctgccgcaggggacctttgcgtggcatggctcctctgcactggcgttagctgtggtgagacacagcttgcagccacagtaggacaatgccaagtccaatggtatttgctgttcaggagcaaaagaactacacagcaacaacacatactatcgtcgagtacctatttatttcactgtatgtgtctgaaggactaaatcgaagccagagccccccgcccatgcaccaaaataaaatgcagacagtgttgagttaccaaaatgacagtgcacctgcaaagggaagtcagtgaaggtttaaaggtgaagacttaaaaatatatagatagcttaaaactgcaaataaaaaaatgtcacatagagattttcatgagcttagaaaaccaggaggagatttgagtcgagagaaaacaaggccagcctctctcaagtggcagatttctgcagtctttggaaagatggaaataaatatggccaggcgcggtgggtcacacctggaatcccagcaccttgggaggctgagacaggcaggtcacttgaggtcaggagtttgagaccagcctggccaacatagtgaaatcccgtctctactgaaaatacaaaaattagctgggtgtggtgatgcccacctgtagtcccagctactcgggagaatcgctggaacccaggaggtggtggttgcagtgagccaagatcgcaccactgcactccagcctgggtgacagagtgagactctgtctcaaaaaaaaaaaaaaaaaaaaaaaaagaaatgaaaagaaaaagatgggaagaaataaaagctgcaaaaggacaaatggacagattcagggcggaaagcaaggacagagcaggatttgagcgtgagacttgctatttgggcttaggtgaaatgaaataaagaaaagggctggagaagtcagaagtgggtcacagaacaatgagatggtgaatggggtccaaagtgtgggtcgccaggactgccaggaggagccacatctccagggtagggctaagctgcaagcaaccagcattatttagcagagtcctgcagaagtgaatggaaagatctttaaaaaacctatgaatggcagtggaaaaaaaagaactgaaaggaaagcagaaggcttatgggctagataaactcattctcagacatatgactgaactgaaactcagataaaatattatcttttcatccagcgtctttcattcgttagaagttcagtttctttatatttcattcatacaagagcaatgcagatttttaaattaatatatgtgctcatagacatgtggatagaaactcattgctgattagaatattatgaattaaggaaattttaacaaaatatacttggaaagtataatatgggattgaaatttgaagccaatgataagattataaagactcagagctaatctttcatgcactattttgtaaagaataaaatattattcttccttgggcctgaagtccacactagccccctcactaagatgataaccacaggggtgagccctgagatcttccacccccaaggcctccactaatcgccatctggacatttgcttttcgtcccttgtactgcctgttctccacctgaacagtccagacacttccagcatgttcactgcccacaagtttacttaggaccccgaagtcctagaaaaaagttgcctttagcttggctgctcctttggtctgcactgtgtctcctccccatgtctttagcttcctcaagctggatggtttcttcctgactgcacagcttcactcccaactgtccctactgccaccctccaccacaccaggggctcttcttttcccaggtttttaaggaaacactgtctttgaggggatcatgcaccaatttcagcaggtgtctggagccataacattttactttcctgtagcagttggaaagatctctctttaaacactagaccctcttgatcctgttaaacggcctgattcttccttctgtcttggtgaccagtcatctctgtccaacatgccagcttctctgtcttcccccactcaggtaaattcagacatttgccccagcctaggtcttagcttcctcgctctgtttcctctgtctcggagatctcacctactctctctaatccttccaattttaatgcaggttgttccaaaacccatatctccaggcctgacacgtctcccatttccatcctgtatgtccatgccaccttggagaatcccccaccatttcaaaccaagctctgcctctccctccgccactaacagtgtattgggtacagtgtattgggttgaggatttatacacttctccctagcattgccagttaggagaccacctgccaatgggaaccactagtcctggctccccacatcttagtcatcttcagttccatcatctcactttctttgtatccgtacacagactaacacttcatttcccccacttccaaccctgtcctcatggcgttcctagaaatgacataggcggacatctactaaacccttacttggtctgtataagtggaggagttctaggtgaagggaacaaaagcccaacttgcaccctgaaaacagagagtcacggcccctcgatcaattcacacacttgcaccaatttaccgacccagaagcccttgaatgaagaggaggccgggtctccttgacgaaggaccctaccacactgtcaagaattaatactgttgctttttctcccagccttccccaaagggacctatagccttttgccagggtgactgtgcactggggaaaaggaattaatcagaccttttggggactactggtgactggctctgagctgacactaattccaggagaccccaaacatcactgtggtccagcagtcagagcagtggcacgtggaggtcaggtgatctctggagttttcacttcatgtttgtgtccatccccatagcactttgttcaggacaacgtggcagggcccacactgctgcagtggattcctggaggcttgtacctcccaacccccaacccagagctgcctacagccacagtattattcagtccaaagcacctctgtgacaattatattcctggctctaaacttccactggtgcccagttgttaggaacaatgcagctttccttagcccgatagttaaaacccttcacaaagtctccttcccctttatttccagttttcctggctataaatcctcaacccaatacactgtaccccactccccccagcccccagatacaccatcccccaacacgaaacacttaccctcttctcagctttgcctttatccacgctgttccctctgcctggtatttccttttggctcctttctctggatttgtgtggtgcctgttttagcacaaatataccatgtccccttgtaaaatgtcttttcttcacttcagctggtaacagccagggaaatgagcaaaaacgtgtggatagattaattcaccagcatcggggagccgggtgggcgggggtggggggtacagtgtggcgcagggcatgtctttctgtgggtaggtcgttaacaattttcataaacaaaagattgccttgtttatacctgttcatcagagtcagcatttcttaaatctgtttaaggtgaaagtgagtgctttgtgttttaaaaatcatatgggaagcacagaaataggaaatgttcactttgtttaatgtggaagtatattccataacaggtggcctctcaacttgcacaaataaaacaaaattggttggctaaaatctatcagagaagaagaggaagtaatcgccaggtggtaggaccaggagcagatggggactatttacttagatcctcaattcttcttgttgagtgtccctctaattaagtacctttccttagatgttaaataaactttcatatttttaaatagtattttttttagaaaagtgtattcccatgccagtttctccttcttccaaagtcaggggtagaataaccatatagcattaatagagtctgtgtaagcttaaatagtccaactttcctttcaggctttttatttgaagtttccaaattacacagctaaaataaaaacagcacagaatttaaattgagaccattatatatcgcagggacttcccccacccccatattaagtaaggcagtgtcagccctggtggtccgtgcagactcagtgcactggaggcagaagttccaggtggactgactcctgcccccacccagacctctggtgctcccaggcagtctggaacaatcagactctggtgctcccaggcagtctggaacaatcagactctggtgctcccaggcagtctggaacaatcagagttgcccttggtcttccggaaatactgtaattccctgtgcaatgttagctcttgaccatctttgaattctttttcttagacttacaaggctctgtcgctggtttccctctcactcttctgacgactacatttcaacttccttcaacaaacacttatgaagcatttatatagcacttactgacggccacagccaggtgcagttttgtggatctgtacacaaatgaattagatgagccggtgcccatcggccctggggttcacagaccaaggctcgctctgccggcatcctgggctccctcctgccgcctgcacctggaacgcttggcggtctccgtgcctcttctccagttctctcctccactgtgctcctttggaaaggcttttctgtcacggcttcaatcataaaactgtattcctagtcctatttcctcatctgaggtgaagcatgaaatctcctcttgtttaccccgaattcagccagctcaccacgagccctctctgcatctgtcagcctctgtcagcagctgtaaaagcttcccttctccccagacccccacatctggaaaccgtctttaagtcgtcctcccctttttactgtgtgtccaggaatccacttttgggcttcctctgaccggcctcttccttccttcttttcctcctccccgccccactgcctccacctactctagtcccaaggccgtgcccctgccccaaccctcccactgtgctcttcccacccacaccagagtccccttctttaaatcctgtccgatcagtgtcactctcattaagtgacagagatgatgtctccaccttttatatctccaacagcatctaacccaacacctggcacttactagaggcatcaacgatgcttgttgttctgtgtggcgaaggcacacctggattctggatggtcagtctcagctctccatctttgctgcctcacagggactccaaatgtggagcgtctcccactgcccttaattagggaaattcagcctcgcagaagacagtgaaactgatgaaagcattgggaaatggaacctaggaaagttaaagaattggcatcatttgatgtgagaaagagaagcgaagatgatgagagatcctagggaaaaggctacatgccctgtctttcttgagacaagcgtgtgcacttcctttgcttccactcttacttgtgtttatccttggagggacctttaattatctaacgcttgggtattggccacggtgcttatcgtctgcgtgtgaatctggacatggtccccaagctgtgtggtgctgtttgttggtgcggtccaggatgcacagggctgagatggtgctgcatgcacacttaccgagcacatccccctgggagaggtgtggacaccaccgtgaagggggcccagacctcctccttaaatgcctgcactttcacagggatcagacatggagacaagaactctcagaagagggagaggcctgaggcacagcaggaaggtacaagttcaaaggaagtgaagatttccagtgagagctatcagactcttgaaatggactacagggaaagcctgtggtctcctctttcttagaaatgctaaactcataacagaaaacctctccaccgtggcttgagtgtcaaattctctggaggcctggggatggggccgggagttttctgcctctatatccccatggtccacttattcgggtggcttagtttgctttgcaagcagggggtgggagcggggctgcttattccaaccacagtagtcaaatgtgttacttatgagaaataataaaagatccttcttcttttctttttctagaccccctctagtcaaatgttgttgtttttttaaatagaggaggttgttttgcatttttcttttcgtagtgttcgaatttagcttttgtatatactctccccagtagttcagagtacattcatgagcccagatcatgaggaatgctcaccattttcctgaaagatggtgtgtggaggatgtgtacagatagaagctaggctgttgaagattttattgaactcatcagcattaacaacagacactgttagtgaggtccgaatgtttttgtttatttttttgactcaacaaacagttattgagcaaggctttcttctgtgcccggcaagatgcttgccacttgctgaagagacaaagatgcatgagatatggtccctgcttttaaagcacttacaatctagcagggaagacagccaggtgtacaaataatcatatgtgttacaaagaaacgattattccggttcaaaggaaggctgttgttgatgaaggatggttgcatagcagaattataatcgtcagtttgaaattcaactttttcaagctttgtcatttctatcttgtattagccttatttttccctttttcaaaatacttatttgcataggtattagtcacatggttcctatactggaacagtttagaaaggtgtttattggaaagtctcgctagcacctccgtccccatccacccaattcactactcgctcttccatcagaataaggaaccattgtctattaatttcttgagtatatatccagcgcccatccatgcaaaataacatatacacattttaaaattttccctttcttacacaaaaggcagcttactgtttgccctgttaatttaacagtatatcttgagattttaccatgtaagatcttatcatggtacatcttgagatgtaccatgtcagtacatagaatgcatgcttttcctttcttcctaggtagtataatacttcctagtattgcatcgttttggagatatcagagtgtgccagttatcaattagctgcataacagattactccataacatagtggtttaaaacaacaacccttttattagtcataattctatgggtgaactatttggcctgagatctgccaagggttttttactgctgcttttgcctggatttgttcatatggatgtgattatttggggctagatggtctaagatggcctcactagcaggttgttgggagagtctgacctcagttggaatatgtgccttgagtaaaccagccccagctgcttcatatggcgactgggtcccacaaaaacagagaggggttggccccgctgtggaggttttattaagcttctacttgaatcccattggttaatgttccattggcaaaagcaggtcatggggccaagcccagagtcaatgtggaagcaatttcaggatgagaaattcattagatgtcattatgtaactatttactacccatggagtaattaaccagcccctgatgatggacacctgtttatttccagtcttttggtattgcagataatgctccaatagataatcttgtatattagtcagttcatatgtgagcagggtaagtaccagaagtagtactgaccctgtgctggatagagggcagatgccttctcaattatctatctatcctatttctgtggtgctgtttctctagatattttaagcttgtgtttttctgtcactcgtgcaggagctttgaaaatgtgaaaagactttagataggaaatgcatataaactgaattaattagaaactcactcctaaaataacaaaaaacatgaaagctagaatagaaatcaaataattttgagtaaagtaatgtgtacattatttgaagaaatacaagtatgtctgttataacaatactttacatttctgttgtgtttacagcatagaaacacttagtttgcttttagtatctcaattctcagaacaattctatgagttgaaagtataattggccccattatgtgtgtgtatgtgtgtgtgtgtgtgcgtgtgcatatgtatgaatgtatttaaaggcttagagaagttacctaacttgccccaactaacaagtaatagccagaatatatacccagccctgtgacaataaacttgacgttgtcccattaatcgcatcttactagtagggacttgtatcttgtatctggcttagcttctaaagatatacatgtgctcaacttgctaattgctttgctagtacaatcacaatcatatatgatatcacctcaggaggctctttttaaaaatatataagtagttaatttctaatttctgaataggtggggaacctccctgaagttttctcttgttttacacatgtcattggcatccaggttgagagctccatctcctgatcatagcctctagtaaatcttgacggaggaattctctttaagcccagggtcttgctttcagacttcagaaaagaggagtttttttaaataaaaccttgtctggccctcccgcaatggatgcagaaggtagactgttttctttcttttaattcacactcagacgttttcgtaaggggcttggtcctggcaaagtgggcctcacatacaaaccacccactttcctgaagcgtgattgattagcaaagctgttctgctcaagggcagcctgttttccccagcctggatgctgacaggtccgacatgcacagattttcaagcaggtcgccagtccccaggctgcaggctgtaggccaggacgcttgttcttgagggagaagagaggagaagaaatccactccgggggcaagaattaagctatattatagaattcccaagacacagcagggcaggccaacatagtccttgtttagagagcccctgatggtgttgggtgccaagaaaaccatggctgcacaagacacacagagtgaaggtgaatataaagatgtttaggcaaagcctgtgcatatggtactgatccccatttgtctaagaacctctaaacatcaaagagagttaaagaaagatagaaatttgatgcctaatcaaagtagcctatgatggaagtttggaaatacagccaagcaataatactgtaaacagaacgaggtacagatcatgtctttgcatgtttgtctctgtggcatctaacagcgtgtcttttacaagtagaatctgcataaatatatagtcacaaaatgttagagctgaaaattatcttacaaaccgtcttgtccaggcctcaccattttaggaatgagttaacagaggtacagacaggttaggtaagtggcctcagttgttctgagtcagaccaggtcttctaaatcttagtgaagtagttgtcataaaattgtgctgccagtattctaacaaatgttatgtgaatgtaggaatattttattttttttgagactgagtcttgctctgtcgcccaggctggagtgcagtggcccgatctcgtctcactgcaacctccgcctcctgagttcaagtgattctcctgcctcaggcacccaagtacctgggattacaggcatgcaccaccatgcctggctaatttttgtatttttagtagagacagggtttcaccatgttcgccaggctggtcagaaactcctgacctcaagtgatccgcctgcttcggcctctccaagtgctgggattacaggcatgagacactgtgcccagccaaaggaatacatttatttcctttttttcattgtagaatttattattattattatactttaatttctggggtacatgtgcagaacgtgcaggcttcttacataggtatacacgtgccatggtggtttgctgcactcatcaccctgtcacatacattaggtatttctcctaatgctatccctcccctagacccccaccccctaacaggccccagtgtgtgatgttctcctccctaggttcatgttgttctcattgttcaactcctacttacgagtgagaacatgtggtgttaggttttctgttcttgtgatagtttgctgagaatgatggtttccagtttcattcatgttcctgcaaaggacatgaactcatccttttttagagctgcatagtattccatggtgtatatgtgccacagtttctttatccagtctattattgatggacatttgggttggttccaagtcgtcgctattgtgaatagtgccacaacaaacatacatgtgcataaatccttctactatgaagacacatttatttcctttttaaagagatttatttaagagtcactgattccgtaaaatcatggaaagtcatctccttaatttacttatgtattaaccaaaggagattcccccaaggtactttctattaggggcggtgggaaaagggagggttataaggatgaattgactagcgtcttttgaaagactttcaggaatttgggtcttaagacattttggccatcttacagaaagtcttaaatgtcagaattgggtgaaaaaaatttaacttttctcacaatggtttgttatatgctcaaggtgcagatagcttggtagggacaattcagcctgcggttaagagtggtctctatgtgtacgtcagtaaactggctatcagcgtagcagcaggagcagaaatcatcaagaccgtggaccccccagcctgtcacttgacttctgctccgtaatgctgcctgcacattgcccatttggtgcaggttatgcctggcttgtttcaaacatcccgtgcctgctggagctgaggatgcagcggattcattagctccataggaatggaccccttcattcaaagctcaatttggcccaggcgcagtggctcatgcctgtatctcagcactttggaaggctgaggtgggaggatcacttgagcccaggagttcaagaccagcctaggcaacctagcgagaccccatctctataaaaatattaaaaaattaaccaggcgtgtcccagctatttgggaaactgaggtgggagaatcactttttcccaggagttgatgagttttctcccacccgtgttgagctatgttgcaccattgcactccagcctgagtgatagagcaagaccctggctctaaaagaaaacaaaacaaaaaataaagcttgatttgttttcccatcccatggcccactgccaactctatcatttttggctcttgactgtcttatacgcgggagtgtagggagaaacttttgccagtcccttcaaagatggctttgacaatctgttgtcctgaataaatttgaacacctgacaaaagagtgtctagaatcttcctttcctttacaaagtgtaaggggtcagatgtattgccccttttgggatataaatcagttattgttctgccagccactgggaacattttagaagcccatttattactatctgcaatggtacctcatatttggtttcctgtgtcataaagaaaaacctgcaaatacctaaaagtaaggattccagtgaaatgtgggttctgcttcactctgtttggtgtgggaggctgtgtaagtctaactctaagaataccggtagtggtatctatcttcattctaagaactgagggaggcgaggtttgtgcagaattaaatcaccctgtcatatctgtgagggcttcctgcagaacgaaggcaagtaaacccnaaacaaacaaaacaggaacatgttggaaacagtcagnaggtatacgtctggaactaaggttacgagctgagccttgaaaagttcatgagagactggcttgcttgaaaatatccttcgtgtgtgtgtgtgtgcgtgtgtgtgtgtgcatgtgtgcgcgttngttttgtttgttacggttnttggtcncgtgctaccgtatttaccccatgtgtggtggttggaaatgtcagggtttcttgattgaaaaaggaaataagagattatgccactcacagcacagaagtgggatgagcctcactatggtgtatacgtgtgcgtctgtgtgtttatgtctgtgtcatctccatgtgtttnctgtgccagtgtctgtgtgtctgtgcatatgtagtgtgtctgcngtgtctgtacctgtgtgtatgtctgtgtacatgtgtctgcgtgtatgtgtgtgtnnnctctgtgtatgtgtctgtgcatgtgttgtatgtgtgtctatgttgnntgtctgtatctgtgtgntgtgttgtgtggtatctgntgtgtgtgggtctgtgncatgtgtctgtgtgttgtgtgtgtctctgtgtctgtgtatgcatgtgtctctgtgtgtgttgtctatgtgcatttgtctgcgtgtgtctctgtgtatgtgcctatgttgtgtagtgtttgtatgtttatggctgtgtgtgttgtgtgtgtctatgcatgtctgtgtgtgttgtgtgtgtctctgtgtctgtgtgcctgtgtgtcttgtgtgtgcatgttgtgtagtatatgtgtgtgtctctgtgtctgtgcatgtgtctgtgtgtgttgtgtgtgtgcatttgtctgtgtgtttctgtgtgcatgtgttgtgtagtgtgtgtgttgtgtgtgtctgtgtgttgtgcgtgtctgtgtatgtgtctatgtgatgtgtgtggtgtgtgtgtctgcctctctgtgtctgtgcctgtacatgggtctgtgtgtgtgttgtgtgtgtgcnnnnnnnnnnnnnnnnnnnnnnnnnnnnnnnnnnnnnnnnnnnnnnnnnnnnnnnnnnnnnnnnnnnnnnnnnnnnnnnnnnnnnnnnnnnnnnnnnnnngtgtctgtctgtgtgtgtctctgtgtctgtgtgtgtctgtgtatgtctgtgagagagtctctgtgtctgtgtgtcactgtgtgtctttgntgtgtgtctctgtgtctatgtgtgtctgtgtatgtctgtgtgtctgtgtgtctctgtgtcagtgtgtgtctgtgtctctgtgtctgtgtgtctctgtgtcagtgtgtgtctgtgtgtgtccctgtgtctgtgtgtgtctgtgtgtgtgtgtctctgtgtgtcagtgtgtgtgtctgtgtctgttgtgtctttgtgtctgtgtgtgtctgtgtatgtctgtgtgtgtgtctctgtgtctgtgtgtcagtgtgtgtctgtgtgtgtgtctctgtgtctatgtgtctgtgtgtcaatgtgtgtctgtgtctatgtgttgtctgtgtgtcaatgtgtgtctgtgtctatgtgtgtctgtgtgtcaatgtgtgtctgtgtgtgtctctgtcagtgtgtgtctgtgtgtgtctctgtgtctgtgtgtcagtgtgtgtctgtgtgtgtctctgtgtctatgtgtgtctgtgtgtcaatgggtgtctgtgtgtgtctatgtcagtgtgtgtctgtgtgtgtctctgtgtctgtgtgtgtgtctctgtgtctgtgtcagtgtgtgtctgtgtgtgtctctgtgtctatgtgtgtctctgtgtcagtgtgtgtctgtgtgtgtgtctctatgtcagtgtgtgtctgtgtgtgtttgtgtgtgtctgtgtgtgtctctgtgtgtgtgtgtgtgtgtatgtctgtgtgtgtgtgtctctacatctttgcgtatacaggggcatagcatagtcatgcaaaaccgtcttccttcaactcatagttctctccttcctcaaccagaagccactctgctttgttgtgaaaacaaataaactactttcttacaaaagaaagaccaaataacctgaaaagctcaaataaaatccaccttatgatacaatattaagaaacagaaattttcaatggagaaaatcccacaccagactgaggaagacagatcagtttaactggagtctctgtttgttttatatttcttttctactctccactcccatttgccaacaaaactatgctctctcacaggggacaggttcacccctcaatgtctgactaacatgcttttcatttgaattcaaaatatttggtgacgattggcaaagaatgaggatgggaaattgaatattacatcatcttatgaaagcttcctcctccctcacttccttcttcctttcttcctcctttctctccctttttccctccctcctttcctctctcccttcccttttctgttcctgctgtgaccgttcccctgattgagcagacgtggacatgggggagtcaactgtaggagtgactggcgcctcacagacaccgtcctctgaggtagctgtcaccagaggattgtcactgaaaatgcaagaagagtttggcatttgattgcattctgcacaattcaagcaggacaaattgctgcagaagatgacaccagaaatagccaccatgtagtgggttctcaccacatgacagacacggtgctgctataagcttgtgacttgcactgtctgagccctgaacacctgtagcaggtacgagcatttgctccattttcagaccaggagacagcagctcaaagaaagtgaacgatttgtcagtggtcacacagctaggaagtggcagggggcgcttagccgggttggactctgaaggtcatgcagcatctttacacagacccaaacccttcaaatcgatttccacccatgtgtgtttggcagccacatgtcaacaagccataactttcttacctatttcgggaaaacattattttctctcacctgtatttatcgtcatcctatttctgttgcaagaaatcaaaacgtgaagaagatagatttgaagaagacctttttttggctacttctgatgatgagatgcagttaggaagatggagttcagatgctaaaatattggaatttctgattgatgcatattcatggttagagggaaagtaagttgcactgtggagttaagaaatctgagaaatacaggaaatccaagctgagaaaaactcataactatgatgtttccatgtgcaggaaacttcaggtccttctgcgcccaaccttcctggaaagcttttatttaaaaaagtttttaaaatttttatttagttatttttaattgacaaacaaaaattgtatataaaggcttttgtattttatcccgtatgataaagggccgcacggttctttcttgatgcctgagttaagtgagcatattaacagcatgcagcgttcagctctcattaattttcaataggctcatttacctttgacccttttatttcaaagccaaaaaaaagaccatacatagagagaaacgattgcattatagctcctccttcaatatgagtcgctcaatctctaatggtttctttccatcgagaagaaggttttagtaaccaagtgactaagttacctagctaaactcccccctccttctttatcaatacttaattagtattgatgcttttcttggctaaatctcatttcagagcctgcacaactgaactttttccataaatgaaccttttaaaatgtgtatttgaaatatctttcagcctaagaaaatagtttttaacaagttatgcattgatttcctcttactctgaaatatttctcaagtgatttttcctgaaagattctttgtggttcattgaacacaaaaaacaaaccgtgtaccaggtctggtagaggttacagggatacagataacttggcatttgttcccaaggagcttaggtctccaagaggaaataagacacttcgacaaatagccacaaggtaaaatagagaattgtccagtgctgtaatttaactgctgattccgctgtacctaaaagctggttaaattatagttttattgaatgctaacaaactcttattcccctcctgcatggaattttaaaaaccttttattttctctgggctataattatggtgaccacattttccatggcaaaaattaagacacgtcgtctgacaaaggattcttgtgccacttctaggtgtgagaccacccatacttagattttttttaaagcaggcttttttaggcaggccctataaaaatagaggtttgttaaataggtgtgtttttagacttttcattaaaagcctacaatacaaacagtattttattttgtatctgaatcaacatgttatatcctaaagcactattttacagcctaagggtgtgtgttagtctattcataaaaacatactgctgcatagagcaataatacctgccattatctaggtgtaataaaaaggtcccaagtggtcctctccaggtctttaattttccttttgaagataaagctccttctttcactttcatggttcaagatttttggaccttgcaagtgattgctattgaagtgtgccagatgtgagcagttgtgagcatagtactttaaaagaaggtgaaggagtgactttttcttccttattgtctcccctactaccatctgtagtttctacacatgtaacttttccaaaacagcaaggcatgggaagggataccagccagggccgccacagtccaggcatgggacttctgaagtgaggagatagagatgaaagcggcctgtattgataaatgacagatgatgaaaccaaggcctgctggaccaagattcaatgacttacccaaagctacacagcttgttggtggcagagttagctcccaatccccagctttgtgagcaagggaggtttccatccccactatgatgttttcttggtgttctggggtcactctggtcgatttccatccactgtgatgttgggtatgccccctccatgtgactacataattctagaatcataattctaaaatgatatatcactgcactatcatgggaaaataagctggaagagctggagaggcgatgcctgccaccactggctcttctatagaggtgaccttgcaggttaccaggacttccccaggccgactctcagatcctgaagctgagtccaaggcaagccttatacgccatggttcctgctctcctgggtatcactgacctactgctgatccaggaacccttgggatcagacttttcccattaatgctttgtttatggttaaaatatcacagagtttagtgggaccactgctgtctttattagatggtttttatacttaattattttgtaacatggctgcacttgtaagttatctgctgatttttttgtagttcataagcataatgattgggtattcatagtcatatgtgagatgtgccaacctcaatctctatgctacagtatagagtatactataataatcactatattattacagcctggccaacatggtgaaatcccgtctctactaaaaatacaaaaattagctgggcgtggtagcgcacgcctgtaatcccagctactagggagactgaggcaggagaattgcttgaatcctgtggggcagaggttgcagtgagccgagatcatgccactgcactccagcctggacaatagagtgagactccatctcaaaaaaaaaaaaagaaaaaagtttaaaaatgtatctcttccattaaaaacatatccaataattctgctaagatatttgactgaccttnnncacattcagcctcattccangtgtaacttcccattcattcatttcattcaatggctatttattgagcacctactatctggcagacacttttctgcttcagcatcaaacaaatagacaaaaattccagcctgtttgtggtttatatgggattggatggtgctaataactgtatcgaaaaataaaaactattagcttgccaaaaatttggattactgtgggagcagagagctaaagngaaaagggaactcatatgtattgaatatcagtgactatgtcatatgctgtgttgtgtggtttatctcatttaatcatcacagcagccctgtgaaagatgaatatgattatttttattttttacagatgaagaaccaagatttaggaatataatatatcttgcttaaggtcatactagtgaggaaataaatctacatcagtcttttcaataccatgctagatgtgatgatatcatntttagaaccatatgtttgatatatggaccaccatactgaaacctcangggcacatttttgtccactaataatatatatcaaggnaatgtcatttcacagatgcatggatacggaaaatgtgtgtgtgtgtgtatatatatgtatgtgtatatatatgtgtgtgtgtatttgcatgtgtgtgtgtgtatacacacacacacacacacacacacacacatacatactactccgccttaagaatattttcatatgcaactacatggatgattcttgaggacatcatgctcagtgaaataaaccagtcacagaaggacaaatactgcatgattccacttatatgagcatctacagtagccaaattcacagaagccgagaacacagtggtggttgtcagggcctaggggaagagagaaatggggagttgcccttcaacaggaataaagaataagcaaatctcatgttaagagttcttaacacacacactcacacacagacacacacaaatgtcactttaatggacatgtttaaaacatcatttgaaatgtagttgttaagttcatgttctccttatcatttttgtagattgatcctcatttctgaatagcagtaatcactacagtacactctcctttcataacaggcatcttccatggaataccttgccccagattagcaatttgatgaccacagtaacatgtgcttctcagataacacatgacctttcatttggctgagaactcagcggttgactttgctaaaaataggtctttaatggttgagtgtgacatttcatcacggggtgttatttgggagtttttctcttcatacatgaaacaagtatggctgtagaattgattacccttgtttccttgatgaaacgcattcagaatttcaaagatattgaaaatatttttggccaaaattagttacacagaagtatggaatctgtcagtgcttggggacaaaacccttctgtgtattgaaaatgcagaagtagacagggaagcatttctggggaggagtgagaagctgtattaagtctggatgctggggcaggggtgaaggaggaggtcttgatgatgtaggtcttgaccaggttggagctgatgcaatggcaagtgctgtggccgtggtatcccctggtgatgtcattccaaggagccagctgccatcagtgctttcaagagtctggctctttgggtgaggggcaccaagggatagacgtgcacctcaggacacctgccatcttgttggccatctctctagtttggggtctttgtggaaaagatgtatgggccatgctttttagcttgtcttatcaccccaaatacttcccgtcatcctagaataatatccaggctctcgatctgatttccaaaatcttacactgccttcgcactgattctcaagcctcagctctcaccaactgcacactcccccattgcttgtgggccactcgaactgacttcctgatcctccaaacacatcaggttgctccctccttgggatcttccactacttgtgacttctgcctacattgtactgcccctaactttcccagggctggctccttcttgcctttcaaatctcagcttaaatgtcacttcctttgagaggctcccctggaacacccaatcattccctctcctatcaccctactttaattctctgaatatttctatacagtcaatgctgtgcttgtttattctttgagatccatgaaagcagggaccatgcctgtcatagtcccgacagtgctcccaagccctaggtgagcaccctgcacatagtagttcaatgagtagtttgtcaaatgaaggaaggaggcactcaggctgtagatgatttaaatgtaacaaacgtatttgtaggttattttttaataatgcaaaagaaatgaagactaggccaattttcttttttaatttcatatttcagcctcaacgcttagttatttctgattggtcagagattaattaatcacatgcaacagtctgtcctgagggggttcaaatgcactgctttttccagtgatttgcaaatgcaccggcctaaaacctactctctggcacagatttcagaatctccacttaacacatcagaaacctttagggcttatcctgaactccaaggctggcttaacttcttcagtaagcagctgcttatgcatggatgcctacaatgagtgatttcaccagaaacccacctcagctacttaaagtgtgatgtatttcatacacacaaagtgttttttcatatgagtaggttagtgacactactgaatacaaattaactgtttttgaatatactggaatctcacaaagttttttctgcctcagaagtggaattcagttgaagatgggtctgtccttagaagaccaagttattatagttgctaaaataaaaataaataaaataaagacttcaaaaaacaacagatgctggcaaggctgtggagaaataggaatgcttttacactgttggtgggaatgtaaattagttgaaccattgtggaagatagtatagcgattcctcaaggatctagaaccagaaataccatttgagccatcaatcccattactgggtatatacccaaaggaatataaatcattctgttataaagatacatgcacatgtatgtttattgcagtactattcacaatcgcaaagacatggagccaacccaaatgcccctcaatgatagactggataaagaaaatgtggtacatgtacatcatggaatactatgcagccataaaaaggaataagatcatgtcctttgcagggacatagatgaagctggaagccatcatcctcagcaaactaacacaggaacagaaaaccaaacactgcatgttctcacttataaatgggagctgaacaatgagaacacatggacacagggaggggaacaacacactggagcctgttgagggtgggcgaggagagggagagcatcaggacaaatagctaatgcatgtggggcttaatacctaggtgatggttgataggtgcagcaaaccaccatggcacacgtttacctatgtcacaagcctgtacatggtgcacatgtatcccagaacttaaagtaaaattttaaaaaataaataaagtaaaataagactttcacttactggggcaggcccatggtttctagggttgagaacaatctccaggggcttgaccctcaggaagggagaatcccttcttcccttgcagggagcatgggctgnggntnggcagttgtgtccctgccatctgaaagtgaaaagtggactttaaatgttgacttatatctcacaatactattggtgtccagcttctgatacttcatgggacattcctttgtacttgggatctaaccttattaatttagagagaagatgtagattaagtttcaaaaacctgaccttagaaaagatgttttaaataaagaatgggctatcatttgtattcgcaaatcacagagaatgtcccgtggcatggaatcattttgtcaagctctgcattccaatccaattttttatttgctctcatctcagggtggtaattgttaatttggagattattatttagggtggattcaacagtcttacatgggattctttttagggagaatgatgggaaattaccctttttcacatttttttatcctgggagagggggcctctattctttcgctcagtgtgacagtgagagtgaagtgaagagaagatttatgatgccaagatcagggctgagtaatatggtaaatcccagtttatcttaagtgcagtaaacccccaggcagctagaagagtgacgtattctggttagttcaacattctatttaatctgggaatacccaatagaccacttttccacaacagatttttatagaattcaaatacaacaaaatatacttgacaccacaactatactgaacacatatttatctcttctaatgacttaaaagacacttaaatatctcaccaagcctcagagtcacacggagaacatcagttatctcagaaacggctgttaatagggatttctggctgatagtgggatggcctgtttttgctgattgaaagcagcacttcattggatgcggtgggtggggggtgggacaccagttctcgttttcccaggtataattcggcaatctggggggcttcctcaaaaatacgtagaacctaaaatagataatgtatgaaaagccccctagtgctgagcctaacgcagaaaaacattcagtacatacaagatgacttgactcagtttatctgtgattggtttggtttacttttgcttttttcttttaggggtgggggagctcttcctacatagttaagggaccttcaactagaggaacttgatatacctaacctaggacaagcaggaactttttgacctccagcgttgtttatggtttcagactaagcaacaacagaagataactacaaggaactatcatgaattatggctaaatgctgaatggtgaccctttaaatcagttattagtatgactggattgtaccttctgccctgggacaagcctagacagagagagttgggagaagcaagtgtaaaaaagcctaggttgtttttctttttcttttttttttttttttatatgctgttaatgggagggtaaattcttgtaaagtttttggagagcgctttgaccttaattttgaaaatgctaagtttacatagcctttgtcttggtaatttcacttctacaagttttttctacctatgtgtaaggatgtctattacagcattatgtattttaattttgcagcaaaaaaaaaaaaaaaacttggggaaaaaaagaaatgtctgtgtagggtactggctaaattggtaaactgatatgaaataaaatgctgctattaagaaaggtgatggatacatatgaactcacattttaaaatgtctgagatttattgtagagggaaaaagtggaagtctgtatggataatattattttattgatgagaaaaaaattagatacatatacaaatgcatgtatattcatagcattttctggaaggatatataatatactgttcagctaatatataatttaaggattatgagtattataaattgaaattaatattattacaaattaatacaaattaagatttgttgatgtatacatagtattatggtaaaatgagtataattaaattattcaaaagtttgctttcttacatttgttaaatattttccagtttatgttctaatttgcttattccaatctttatttctatcacctatataattaaactccaattcagtttagggtcattcataatttccaaactgattattttactgtttcttcagtagtgttgaagataatgatgatggcactagtcatcccttattgaacccctatgatgtgctaaacacttgtacttatattttctctaaacctccaaaattgtaaaagttgatgaggaagcagaggccctgccatcttaaggaacttgctaaagccatgcagccagcaagtaagtttcagagctagcactgaaactcaggtctaacgccaaagactgtactatttccatatgtcattctgcctcagatatagagctggtgaattcatttttcaggcagtgtctttgtgggtaagacagatagctgcttaaaaagagatagaaaacatgctttggattgttatggcttgctagcattttccactcaccattgttattaattattctgtgtttcccatttgtcttaactttgatcgtatacttacaaagtttatggaaactgcccaagtgcattcgattctgctgatatttccatggtctgaacgccagccctatgagcaggggccaaatggagcatgccatctgaagactgctccagctttcagagctggacctggttcaaatgggaatgccataccactgtttattttaatgagataaagagcaaagaaaaataaaaaagcaaaatctgcatttgaaaacattcaagtaacgtaatctgtattagtcgaactaattctaagcctggcctggttttgattttagagatttccacagctccacgtgtacccccagggtggccatgtagaggtaacaacaacaatactaggaagaccattccaagcctctgtctccatttcttgcttttctgacacccttcacctgttctttattcagctatttactggggcatggtctttatctgaagtttttcctggtattttcaacccattaggataagtggggtgggtgtnanngnnggggcntgnntgncccacaaaacagacatccaacttggttttaggaaaggctttttagaggaaatgataactacacggagtcctgaaagagaaatcatagaggtagaggtgcccacttatctaggtagagagaacggcatgtgcataagggagagataaaagggcacacagtacatctgtacagctgtgagtccccaagcatctgacctctcttgaatgaggatattgactacaggttacttagttgaccttgttaaagccttatcatatcaggattaccagggtacaaaaacattcctaaaataaatggctctgttactaaacactccccttataacaccattgttgacactgtgacttttaaaaatctctcatatctggccatacctgtctcaccttcctaaagtcacactgacagatgacacaccagggcaagatgaaaactgtagggacttgtgtagaatgaaacgataacttcctgttcttaaaagggactgttgatataatatcctttttgcaaaaacagggaaatgcttaaggttggagtttctgttttcaataatgaagatggatattcacatgaaaagaagacaaaagaaaacagaatgccccagctgtgggctaagcagttggctatttttatttgtcaggacaaaaacatcaaatgacaattctttcttcatttctctttatgaatctagtactaaagaatgctactaaatcttaagttctattaactcctgacaatgtataaacttgggtttacagtttatatacaccacagttagggatttccatatatcctccagctagtcaagaaaacctttgtttggagttctttactgactattgcatcatccaaatttattttttgcctatgaaaactgaaaaggtgaagaccaaatttggaaattcacgtgtgccaatgcagatatcaacatgaacaaaagaaaaatacatgtattggactttggaaagtaaaatcacagacctattctggttcaaggtcagccataagtggaattgtaaagaaaggccagaaaataatatatggttcatactcaagaacaagaatggtcatatcatgtacaaaatgaattgagctaaaagataaacagtaaaatgctatggtttttattgttagcagacttccactaattataaattaaaggcagtcagtaatacccatagattaaaaagctagttgaaaactgagattcctgtagtaaatattaagcgttgtgtggtacattagtcacatgtgtataataaagacaataaatccatgtaagtacagcaatgatgaaatgtgcataaagcagtttgaactccacagaagtaagcaaagtataaatagatagcatgctcaggcacagagaaaagcaagtgctattttagcacttgagctagtgataatttattgttcaggctctccagttgagtcaatgtttatatggtgctatatattaactgaaaccaaaatagtctgtgcacatcactgtcttggatagattactgagtgatcagcagaaaccatatcaaacaaccactcccctacgagtgagggatttataatatttaaaatattcatcctaaagctccaagctgttttgacagttttgtctgttcataaatattcttcaaagagaggcagtatggcatatgtaatggaaaaagatagtaaagtggttagcattccaaactcaggacccagattgcctgggttcaagtcctggctctgttacttactagctgtgttgactttgggcaagttacttaacctctctgtgcctcagtttcctccttagtaagtggggttaaggatagtacctacctcatagggttgtgaagccgaaataattaatacaaataaaacatttagaataatgcctgacacagagtgagggttactacctagactctgccacagatcagcagaatgactttagataggttacttaaccttgacctttggtttcttctttgtaagatgcaaaggataataaacatcttacagtgtgactgtgagaatcaaatgagataccatatggaaagcagctagccctgaaggaaacacttcagattttcttcttcttgtctcttctcatcctttcccttgcagggatatttgtaaggacactttttttagcatctctgtatgtcaagcactttgttcctaccccactcacctagccttgaccatactttgtgaaatcacaaatagtcagacgttagaacccaaagaattgacctgaagacctgtccttttatcacgacactgcttttccatagaaatacttccttcagaaatccttttaagattaatgccacccaattctggcctactcacttcttgatcagtgtgggctgtattttcatttgtgacactgaatatgtttgaccatttcatgtatatgttatgtcttcccaaccaaagcctgtgttctgtgagagcaagcatctctcataactccctctggttagcctttcttgcctggctttcagtctgattggatcagaattggacaggaccagaggatttagcaggtcaggagtgattatcagctgtgaagttggcagtgtcgctaaggagtggaaccaagatgcccactgcttctggggccacattgatcacattcagacatccagaccctggaaaactcagggtcgtttctgagtctacagtctacattcaagaagaagggtagaaattcaagaagtggccaagaaagactttcaacaacttactcggatgtcatcaggggaagactaagagtatggccctcaaggcgccttcaaggatggcattacttgctgaattcatcatggtcggggggcttcaacagtttacagaagccttcaaatatttcaggaagcctctgcttccatcctactctcccctgatgggctacagtctgtattacagcaggaatccttttgcaatgagttgcacttatcttcaggcaaatgccccagatggggatatgaggttttatttacagtctgcaaaatttccctaaagagattggtgcaaagcagagctctatggacttcctcctggcatgcttgaagatctgatctgttcatccctcaaaggccagatccatctcttaggggctgacacccattaaaagccaactatataggtgttcaaacaagaatgccagtgtattcatctgtaatgagaatatttcagattaatattcatgcttgcctggccagcccatgctctctctgcagggaagttttcctaggaagccagatatgctgcagaggcagcttggtgagcacagaatctgaatacaggaagttagaagagtgggtcggtgtcaagctgagcccacacgtgcattcccaaggtcttcttaggtagttggtcaaggctccttatccatggccaaggccagcgttggcctctcaaccagcagccgatgagtccctgctctgattggtagctctgtctcctgcaggtactcagttgagttgtaatcaaacacttcaggattgggaccattctgtttctttgcggggcctttttctcttctgctctgtcatgcgtctgtgccactgtggtcctggggatggtatgtttgagggcagggccccatgcaggctccttccacagcataatggagtgctgccttaagatacactcaaagaagggtggtgagagaggtgtgtggttattcttgctaacataaattgcactgtttaatgtacacaagagatgggaaaaagaagagagcaaaagaattctctccaggcaaatgtttactatggaaactgtgtgattacagatgtccatatacaattctcagacatctgtttaagccccccgcccccgccccatgcagaaggcgatggcgtgtttcctttcttctgaactccttccacacatggaatgatgccattgccagcccttgtcttcagtcgcctttttcagaattggtttacttcttgttgtctttgaattttctctcatctagaggctgctttggccctctgaggtacccacgggcacagctgagctgatggccaagcgcggaggccccatctgcagctgtctctcatgaggaacagctgtcccatgcccatggggagagcaagtcctgtgtcccaaacagctctgtgccccacctcaccctcttcgccataatagctcaacttccatgaagcctgctgtgatgtgagccacaacaccaactcctgggtggggngntnggggggcattttcctctcctggagcaatagaggagcagacacctgccctcttctttctctccctcactgctagcccacagccaagagggaggtgtccagaggggtcatttcctgccctctctggtggcttgccctccatgagttgctgttaccccttctgcacgctcatctgccagctgatcttacttcgggtggaaggttttgtgtttgttttccttccccagcacttccttgtccatagcaaggggtgggtctgagccccaccatcagtgtgacatgcatctgctcatttgtgcattgacagagattcgtcagtgacctaggcatgcccagctcggtgctgagtgctccaggcagtaccgtggcttcaacagtttgcagaacccttcaagtatttcaggaagcctctgtttccatcctgctctcccctgatgggctacagtctgtcttacagcaggaatccttttgcaatgagttgctcttatcttcaggcaaataccccaggtagggacatgaggttttatttaccgtctgtaaaatttccttaaagagattagtgcaaagcagaactctatgcaaaatttttttgtcctacatgtggtatgcatgtttgtgtgtgtaataaaactgcagagttgatttgcagaatgggccaatgaagcctgttttatggtctaatttatggcaggagaatggagtttgcacagccaccccttgtttcaggctgtttaatatgcagggtggctgtggtagctgctctctcttcttcctgtcacccaccctgtggacatcccccggtctcaagggagcagcatatgtttttccacagtcccttctctgcagaggccagccaaggacgcattttgtccatcaggtgttaggatcctcgctccatgcggtcagctggtggtagctctgtgttttctcagtacagatgtggctggactggcactgggaccacctgatccttcttcacagggctctgtttcaaaccgtgggctggtggccagaccctcttcagcctgagcatgtccaggtgaatctcctgattgtgcaggctgtggctgacagctctggatagggaacagcttccaaccttggctgtccactagaatcagcctggagtatttaaaagttctggtgtccaagccacaccccaaatcaattctgccacactccctaaggataagacccagtgctctccaagtgatttcactgtgtttgcaagattgagactaactactctctgggaaaagagaaaggaggaaagaggaaggcagagcaagataaggggagaagattggaaccagggagaaggaagaaatcaagggctggccagaggtggtgaagtaaggaggtgccccccagcaggtgcctggagatccccagcaaaaggacgatgtgcctgccccatctctgaccctgcacttggacgtgaggaaccaagagaggctcagaagaggaggcagggctccttctgtggaacctgcatgcatctgcccttcccatcagacagactgcttcctagccgtggatttccagatccagagttcactggaatgtctcttagcttctgtttcttcatccacaaaacagagacgtcaaatcgtacttgcaggttgtcatgtggatttgataggatgatggtgaagttggacacatgtctgacattctgcaagggaagcttaatgatgatagaccttagaagaagtccacaactctatttcaagttaaccctccccataacttcgttctctctgctgtgctgaaaggcagtggttctgaaatgttgttttaggagagctaaaaagaaacacagaggtccgggctcactgacgggtccaggcatctgcatttttcccaagcgccctgggtgattctgacggccagtgcttgggatcctctctacaggtgaaggtcccaatcgcaaagctaagagagagagattctgtgttgctcacagagctttactgccttccagggcttgttttgcacctcctagttgctctttctaatgatttcagtgactgtcccacctcaacataggaaagaggggtatgcgaggcgtgccagggccagcagccacacaggggtaattttggctaggttccacctttcatttacaagtcaaactgagatgaactctaaaactggcatcctccaaattagtaacctgcagccaaacaaggagaaaacgctttttcatttctggtggcagaggtaaaaatgactggtctgtcttgcatgttgcacttgcttgtcctgaaagctttacatttggggcctccgtcgtgagccatgagagtgcatggtgaaacaaagcatcttctccacattaatatttgtttttaaaggcatgaaaagccccttggatcacaatgaatcaaagcgtctgtacactgacacgtttccactgggcattgtgggaatgttggtctgtgggagcccacaggacccttggtggatttactgcttattgtttttgctgtaactataataggaaaagggatgtgtctgcccataggagcagctaccgtaggagccctgagaggcccgggagctggagggctaagggaccttgatgatggagagccccatcactagtagtttgagagccccatcactagtagggggtctaggagcattggctggagaccccctatcctacaatgcagcttcagttccccctgcttctccgaggcagagttctcaccaagggcagtactcagctggctggcagcgaagcattcacgttgccgtggtcagcctgggaaagtggaaaacgccatggagattaagcctggggtgggatgggcggtctggggtggggtgggcggacagcttctgcctccaccttctctctccaggggaagcagtgctgctcagcagcccccatagagccggggaatcggagcaagccgtttgttttccgtttcacaaaggaggagaagggattcctgctgcagtttttgctgaagagcaagacttcctagcaacacccagagcttctgctttagcaaaggattttaatatctcccttccctgctcttccccatttggctagggagctggtgtctgattcagaaaagcaacttggctataggacatcagtgttcctatggctaaaacacattttccataagccgtcaggggttaataaaatatcagctaggcatgtgtagtgggtttggaagggagaagaagggaggaaaatgaaagggaagaaggaatgatgccgaaaggtaagggtttcctaatcaggtgaagcatagtgcttaattgatagattgcgtagatggccatgtgcttttgtaacttggggctctgaggtctttcatgaaagggatagctataagacattcatcacaatactgcagaagtctcattgagtgagaaaagagaaagctaaatgaatgatcaatcagagaataaggacacttacaacagcaatgaaatcgagcatctgttgagctactgtgtgctatgctgcattctaaacactataatacctggcaactcatttcatcgtcataagaactctcaccggcgagttaggtactattatcatccccaccgtaggaatgaggatgagagggcttgatcggaatctcttgacttaatcaatgtgagtgtccatccaaggaccacaggtaagattcaggctgggtaaagactgagtcctttgctgagatatgctccctcccctaggtggagttgggaaccttcgcctccttacctgccttccgcaccgcaacatagggctttctgggaaccaagcccataggattagaactcctttggtatcgttacctttcctcacctttacaaatagcaccaggagaaaacatgggaaggggctcttgtgtattatagcaggcacagacagttccaaatatttgggatgagatgagagccccaggggccctagagggactcaggatggccttttcgggggctggaatgtacggtgtgtctgagaatctggcaatgctgccaaccggagcagctttctctcagcctgtctcaaattctctccttttctgcccatgtctagagaactcagacaccttttcttttccctccactccagcagccttactgagcgcattcccaactcacaggaaatgttcaggggtgggtggaccattcattcccactctccattgcagaatctttgtgtgtgaagggcaggaaaataggttaaaacagccattgggcactcatgctgtgcttcaggaagtctgctccaagattcccaagcaggctcaagaatggaagcagagagcaagccagaaatatccttactgctttattttattattattttttaaattgcatgttggtgcttttccattaattttaattgactcaagtcccatgacttttgtgatccccaaatcctccataaactcacttcaactgactttttttttttttttttgccttgaacccctttcccttccctgcctgggaacctgccctttaaattggtcatggctgggattttaatcactcctcaaaggcgcagtgacaatttcacaacaaagcagggaggttgggggtgggaaggggagggagttttgtnntttnctactccgattaagagagcaactgttctctgtttgtcccctggggcccactcttggcaccaggctggggagacctcaaacttggtgttgcaacatccatcagacccaagtgagtctggggctcctcaaaggtgaactgcagctgtttggataaaattctaaaatcttgtttgggagattctcagcccttgttttacaatcgttcttcctggcaaagaaaccaggaagttttactttcccaggatctcaggcaggtaattgttttcccaaactgtattttaatctgatggaaatggacattctttgctctgagaaccttcgcccacatccataaaccgtttgtatccgccttgcgcatgggaggctcgattacacagcgccccgccctcccctgagacgcgcttccatctctggttataatttagggccattttcatttctaaacaacagttacgagccttttagtctcttggcatctcggagtgctttcctgttcagcggcggaccacagccaggtggtgggtgatctcccgaggttgggaattggcaaaatcccttacgcggtgtcatttttaagcaaagcagcataaacggtgacgagctggtagtttctgccataaccaatgctttcatggcccccaggctccaactgatttatcatgaggcctcttgctcaggggacttggctcacgcctgaaacaccagaggccccgagtctgggccctgagctcacactgggactgtgagcttagggaagtggctgcaccagtccttttggaggtgtgcacgtgccctcctcatgcaggctgacctggcggggctcttatggggaggaggggggctgagttaattctccacccctgcactttctggagatgcggagagtccaccacagggaggcagatccagccctccctagtgaattaagtgactgcaaacagagtcagcttggaagcttcaggcagggtcctaccccctatctccgccccttcttcttgggggctgtttcttgacccatcattaaaaatgtaaaagccaaaacgtttcaggggaaaagtccaatttgccagaataactttgttactcatcaacaaatactgatctatcacaccttgtgctaggtgcctccacgctggagaagtagccagcccatttaaaatgtcagcaaagattccagttgtctaaacgcgccagggacaggcaaggaggataagtggtgtgaggaggatgctgggactcagctgaagttggaaagctcacagccggtattcagagaactgcaacagggtcccctgggatattagcacgcggggaacctgccccagcatcagaggccctgggtcaggcctggtttcttaggtgttctttgtgctactcctcattttgtggagaggcatccttggtagaagtgaattttgtaaaatatgcaaaggtatggctgaatagtgaactcttcccctgtcctcaggaaaagcacatttggtacctcctgtcagaggggactcagcaatccactaaagactttttttttaatttattttttacttttgaaaaatgttggcagggtgcagtgactcacccctatggaagcgggtgaattacttgagcccaagagtttgagaccagcctgatcaacatgatgaaaacccgtctctactaaaaatagaaaaattacatgggcgtgggggtgtgcacctgtggtcccagctactcgggaggctgaggtgagagaatcacctgagcccaggaagtcgaggctgcagagagctgtgattgtaccactgcactccagcccagaagatgggagtgagaccctgtctcaaaaaaaaaaaaagaaaagaagaaaaacatcaagttcttcgggaagggttgggaggtgataaagagaggctgattaatgggtacaaacatacagttagatgaaggaataagttattgtgtttaatagcacagtaagttggctatagttagcaatttattatatatttcaaaatagctggaagagaagattttaaatgttcccaacacaaagaaatgataagtgaggtgatgagtatcctaaacactctgatttgttaggtattgtatgcatgtatcaaaatatcacatgtactctataaatatgtataattactatgtatcaattgtaaaaaaaagaaagaaaagactattactgcccttgcccatttacccgctactaccacccactcactcttttattcactgacttattcactgtttgatttattcatcctttctttcactcgttcactcactcattcaatcaacaagcagtccctgaacaaatgctgactctgtgcctgacacggtctaggcaggcaaacaccctattgggagccgacaggaggagggttttggaaccctggtccccaggtgcctgaccacccacattggcctcctaggctgccctcctcaggcccactgggtctctagtgtcagaaaggactggccagaggatgagagacagaccaatttgttaggttaggtctcatcattatagaaaatattgaatagtctgccagtgattttatctcaagcattctcaaaacactcatttccatcctgccattgctccccatgctaataaaggaaaattctttcaatagaccatgccaagtcctgaccagagcgaacagaacagctcgtctagggaagcaggcaaccaaaccacgctgtgggagttcaagctgagatcattttttagatttccctttgcttgaaaattccatccacaattttcacccaccttcccatcatcccaagtcatgtatccttccatcataacaagtcacatctccagtgtgagtgcctcccatgtcacaggcagcagagaagattacagtgaaactattcagagaggtgtgagccccgtagaaagctggagatcagaggatgcccgtctctcaggctcctgatactcttaagaaggtgtctaaatagattgtctcctgagtagtcccaatagctttgctgtctgatgtggcgtggagctccagacaactttgtctccctgagagtatttttgggcacctgtgtagtgggaggaggagagagcaagggttgggaaatctgactttgaatctcctctctatcatttaccagctgattgatccaggccaccccttcacttcctgaagcctgaattttcacactttgggttccttcttaaatccattggtaaaacaggtttagcaccaatggggaccttacatgaactaacagggctggaattcacctaggttgcccagctgtgctggctgcttacagctggctgaagcctagtctgattggcctaggtgcacactatgctggttgctagatgttttgaatatgacttttggaaataatatatgtgaaagtctctaggcagtacaacagatggttagctaattcgactatagcatttggctagtaccactcccacgtctaacttaaattatgtttcataatttttttaatcaattgacaaatggaacaatctttaaatttgcctgtatcttttgagggtcaacaaagaagttattcagtgtttagggctgagccttcttttccagtattttttcatgaatgctagtgatttggttgcccaaagttccagggaatgaactttatccaagctttggagagtgactgaggaagtgcttgtggggggcttgcgaatgacgataatatttgaggaaggtggcttttgacaaaatgtggtagacttcaaacaatgtcaagacagatacccctcaacctggatttgtgggtcagtgtggcatcttaggtgaaaacggcagacatgtgtttttaggagtatgctatatagttcttaatggaattccacaaaatttagtgttttgggggagatgacagagagattgagggaagaccgtagaacttcttaatgcttttttttttttttttttttgagacaaagtctcactcttgtcccccatgctggagtgcagtggcatgatctcgactccctgcaacttccgcctcctgggttcaagcaattctcctgcctcagccccccgagtagctgggattacaggtgcctgccactacgcccggctagttttggtatttttagtagagacggggtttcaccatgttggccaggctggtctcgaactcctgacctcaggtgatacacccgcctcggcctcccaaagtgctgggattacaggcatgagccaccatgcccagcctctttatgctctttataacagaaaatgaatgtaccattttttacttgggtctcagaaaagacaagtatgagttggtgtttaacattagactaggttgtaaattgacaggagagccatccacatacatcagaaaaagaggagcagagaagaaaaaaaaaacaacaataaaagacctgagacatccattcatccacccgtccatgcgtactagaaattctgagtttcaattgtgtttctcattgagttttgggttcatagtcttggctgggtcccttagcattaagtgaaacaactgctaacctaggaagtaggtaatctttgtttatttattatctgtaaaatgaggaacaaaagagtactcatttcatagaggttttaagaattaaatgagtaaatatacatatgtgtatgtgtctatatatagtcatatatacatatagtattatagatgtgtgtgtgcatcctttgataattaaattacagctatgtatcctctctccagaaaaattcacaaacacaagaaacttagcctaatattttcagagattttccaaagccatgggcctcattccaattatccaagtgaggaaaccctttctatactgaaattcttattatgtttttctcacttaaaaggaaactgcaagtcaaatttgattatagtcagtattctacaataaatatttctttgtggttttcatccccctaagatttttaagctcagtcatgtctagaatataccaaatgataagaagtctgatacaaacaagaagtcttgtcctattagagttcatagtaatagcatttgatctataataacagaaaaaatattgcatggacatacattaatctattcctgagcttaactccagatgaggaatcagtttttatatctcatttgtacagggtggagagagatgggcttttttctttcgatttgtttttccacgtctatttagagcaaccaaaataggaaaactgctgcacaggtcttaaaattcacttcctccatccgctttccgaattctgctccaggtctgatgactataactttttatacatgtcatttatttttatttttattttagtctaaatgtctcttcaaaaacaccagggaaaaacatttttagcttcactaagaaaacaaacatgtttaaacaacccccaaaatgttcaggtagagtcggtgtttttggcttgtgtgtattttaacggtgagcctagcaaaatatatgttggaaacagaatttttcttcatcttacatgtgccagtttctttctggaataaaacaaaaaggagaattgatcacaacttctatattggagctaaacttcttgtggttgtgaaaggttatttcaagttaaacaatatgatgtcttttttcagtttttaattacgattatgtgccagtttctttctggaataaaacaaaaaggagaattgatcacaacttctatattggagctaaactttttgtggttttgaaaggttatttcaagttaaacaatatgatgtcttttttcagtttttaattactatttatagacatcctgcgtagagtcaatcaatgggaatgcaggctatggtgcaagtgaagacaaagctgacctaaaggaggaatgaatgcggagttgagatccgttggtgcatcatgacttttctgccttcatgatctcattgaatacttttacattttcaggtagagttggtcatttagatgggaattcactgtttttgttttttgttttttgtttttgagacacagtcttcctctgtcgcccaggctggagtgcagtggcacgatctcggctcactgccagctccacctcccaggttcacgccattctcctgcctcagcctcccgagtagctgggactacaggcgcccgccaccacacctggctaattttttatatttttagtagagacagggtttcaccgtgttagctaggatggtctcgatctcctgaccttgtgatccacccgcctcggcctcccaaagtgctgggattacaggcgtgaaccaccacgcccggccgggaattcactgtttaccattttgatgcctactctcagggcatgattgttgagtccccaaagactcaagtgggaaaataataatattctgatgaaaaagccagatccatctcaccagttcttcaggaccaagcagcatcagggtgtttagtgtctgcgttgttcttgctcaacagacagataagtgaggaataatactcacgagtgaggagatagtagctgtgcagcaagtgagtacgtgaatgaaaggatgtgaaaagtaattaccaggtgaagtgctctgtccatctttagaaattgttcattaggattgtgttcattcactgtgtttttaaactattaatacataagaccatgctaagctcaacatgctctgaatcatgggagtcagaatcatcctgtgccttataggtattagcccaattacaggtcagagttgaaatctaactctgatatataacaaatgtatttgatattctatctaatttgtgtatatatttatgtatgtatctatttattagagatggggtctcgctttgtcacccaggctggagtgcagtggtgtgatcatagctcactgcagcctcaaacccctggactcaagcaatccttctgcctgggcctcatgagtatgtgggactacaggcctgtgccaccactcccagataatttttttcttttaattttttgtagagacaaggtcttgctctgtcacctaggctagtctcaaacttcaaggctcaaggaatcctccagctttggcctcccaagtgctgggatcacaggcatgagctatgtgcctggccatatttattatttttatctcttacagcttgaagcatatttaccatatatggactagctttctttcaaagtttcattttacctgtggcatcatatagctgttttgtgagtgcacttaactagactctattataactagatgttatcaatcagttggttattgtcagtaacatcccttctcatttcatgattataagtgctttgcccttgcaagccttctgaatgctcctgggccaccagttgctaagcattttctttacatgttatctgagtttatcaggatctcctaacctccctcactccagcagtgaatcaggctcattcacaccgtgctagtggaattgcagggtagacacactatgagatatatcagcaggctatttaaatcctttcatttcctaaaaggttaaaaggccagatcttagaaattaaggtgttggtttttgttttttttcttaaatccattaacctggcacagggactgatacttgaaaattacactagtaaactctggccattgtcaaatgatggacacgtatcacacatggcttatgaatacttaggcaaagcatggtttttagacattttaaaagttcactttgaattcagaatagaggaaaacattataacagtaagaaaatctcataaaagctgaatttatatattttactagcattatttcaaaaataaatcgttccttttctaatctgctcaaaaaagtctatttactaagaatacctaagaaaacattggcgtctacctgattctaagtttttggaagaagacactcgattggtgtaactctctatcagtgtccagccaactgttgacagtcacccatgtgcgacctgtagcttgtgagcccagtgaccgtccatgacaagcctgattaatttcatacctgctttgcacattatcgtttgtacttgtgtttccttatgtgcaaaatagaagtacgactgaatgaaagttttaaagagtgcagatggccccatgatttgaagtcttgagcacatataaagggcagacacaaggaaaatttgcagaaggataatgaaatgggagaagaactccaaagtgggacccaatttactggtcatataccgaatgtgacttgcatctcacagtgttagtggaggactttctctgacctggggttgggtcttttccgcataaacaccaaagatggaagaaaggaagcaaaatgtaatgtagctgagctttggatggattaagtcaaggtcatataaaacagttccaagcaaaagtggggcccaggtgtccatattacgagttgctaacattgaacactgactatgcacaaggcaccattccaagctcattgctatattattgtagcccattgaaaacccaagtttctagatgctgccttgtctgcttggtgttgcttagttcaatgagttattcattcattagtatgagagctcacacttaccatgtgcccgtcactgttttaagcatgtcgtatatagtaacatattttatactcccaagaacctaatgaggtatgcactatcattagccccattttatagatgaaaaaaactgaggcacagaggcatttagcagcttgcgcaaggtcatgcagtggtaagtgactgagccaggtttaaagccatgtgtgtgctgttagtcaccaagttaggcttccttccacatactgatcactgattacggtcataatatggctattgatgacatgagtttgcttgttacagttgcaaggaaaacattgaaaaatgtgtaaaagaacattaaaggatcatctctattcttctcaagagataagaattttaaatagcattagaattactttgatgacggccaccggcatctaccccttaaagaaaacgcgctgggcacggtggctcacacctgtaatcccagcactttgggaggccgaggcgggtggatcatgaggtcaagagatcaagaccagcctggccaacatggtgaaacccccttctctactaaaaatacaaaaattagctgggcatggtgtcacacacactgtagtcccagctactcgggtgactagagcaggagaattgcttgaacccaggaggtggaggttgcagtgagccaagatcatgccactgcactccagcctgggtgacagagcgagactccattgaaaaggaaggaagaaaaaaaagagaagagaagagaaaagaaagagaggagggagggagggagggagggagacagggagggagagagagggagaaaggaaagaaagaaaaagaaagagagagagagagagagaaagaaaaagaaagaaagaaaaagaaagaaagaaagaaagagaaagaaagaaagaaagaaagaaagaaagaaaggaaggaaaggaaagaaggaaggaaggaagaaagaaagaaagaaagaaagaaagaaagaaagaaagaaagaaagaaagaaagaaagaaaaacacgaaggggaaaaactattctgtctgcatttaacttagaaaacaagggcctgttgtttctgaccgcccaaaagaagccctccatggaatcgattaggaaataagtgtcaccagggatgatcaggtgcctgcctgtgcctgtagtgctgggaagcccatgttagattctcagaatcaaggctggagatacttcaggagagtcagccagaggctgggaattttgcctgtttattcaatgctgttaggccaataagcagctttcatcaaatacagttaagaccccaagataaagacagatgaccgctgagcgtgttcaatcctgaggacttgggttgttgctagttagttgttgagaatggctccccactttggattccaatagggaaagtgcaatgtttctagatcccaccctcaggtcaccttttctcttcctacaacatgcagaccgcctaaaaagccctggcattccaggaggactttatacttcacagaagatgagggaatctttggaaatttaggcgacagaggccagacataccaataaacggagcagtccacatttccccccagttggaaacagatcagaagctttaggcattggaaaatgctagccacatagcattctgagtttgagcatctcgtggatgtctggctgtggacgtcagctatggatgacgataagcctcctgtgactctccatgcagagtcatcagtccgtgttagaactgcagccagcaaagaatgacctcagagactatggatgtgcatcctccagggcctcagtccccacctcaacatttggcctgggcgatcagttccagtgttgacaggtggcagctgctggtggtccaaggggacttaggacatttttaattgttttgtagacatggaggtcttgctatgttgcccaggctggtctcaagctcatgggctcaagtgatcctcctgcccatgagccatcacacctgaccccagtcctgtttttaaatgtgcccagggaaggaattctaaacctcctttgtcagacttcactttggcaaaatgatccttggtacattggcaatggatggaacaaggaggcatgggcactcttgacacattctccaataggcccctctgcctttaggcagaaccacctgcccattccagccagatggcaacaatcatgttgttgttgttgtttagagaaagggccccactctcttgtccagcctggagtgcagtggcatgatcataggtcactgcagccacaaactcccgggctcaagtgatcctcctgcctcagtcctgctaattcctttatttatttttttttttttttgagacggagtctcactctgtcacccaggctggagtgcagtggtgtgatctctgctcactgcaacctctgcctcccgggtttaaatgattctcctacctcagcctcctgagtaggtgggaccacaggcatgcaccatcacacccagctaatttttgtatttttagtagagacagggtttcaccatgttggccaggatagtcttgatctcttgaccttatgatccacccgccttggcctccccatatgctgggattacagacaggagccaccacgcccagccaacatccggctaattcttaattttttttgtagagatggaggtcttgctatgttgcccaggctggtttcaaactcttaggctcaagtgatcctcctgcctcggcctcccaaagcactaggatgatagtcatgagccatcacacctggccccagtcctattttatttttaaatgtgcccaaagaaggaattctaaatctcctttgtcagccttcactttagcaaaatgatccttggtagctaggcttttcctatagcaagaagagaaatctgacttagagagaaaagttatgtatttaaaatgtcctagaaggctagatggatggatgatggatgttggatggagagaaagagaaaaagaagtagataaatgaatagatgatattcatgatagatgaatagatagatgaaagagaaagggaggtagatagatgaatgaaggaaggcgagaaagacaggaaataggtgactgtaagagacagccaaccccctagcaatgagacatatttattatagaattatacaccaaaggaggcctcttaaaacccattcaaaacagaagccaccttccttcgtgctcccatcacctttcccacatccctctactccagcaccttctcatgttgcaacattagaatttgttagctgttggtctccctggctggagcatgcgaccataaagcagggattacatctcattctgccgtgtagtctcagcatctagcccagtgcctagcacctggtcagtgctccatggaaggaaagacaaaaggaaagaaggaggggagggaagtacatcagtcaaccaatatgataaagaaacctgtataagacgatagtgtcccttgtcaggaatgcatcatttctaatgctgcaatcattaatgttttactaaccaaacttaacctatgtgatacctcatatcccgtcggtaagctgtcatactccaagtcaatacagtgatagcatctgcccagtgttggaggggtgtgttaatgctcactcctgtttaacactgttctaagggacaccagttcattattatactgtttgtctcctaaataatttccaaaaaatgtatttcaccagggttccctgttaatatgtatacgttttccatgatctgatcatgatatcgtatgggcttggccagtgagagctggcgcagtcaactgcagggtgtcctcccagccagtgacagtgtggcttctgcaggtacctcgttccccagtcaggatatgcgtgctgtccagggtccagggacgccgtccctgccccgtccagggtcctggagctggcttgactcctcgccttacatcccccagtccaaatcctctcgtcttccaaggcccattccaaggttggccaagtttctcctcctccacagcggatccttctccccactctgggagctgccttgtctttctccttagcacttcctggtgtcacatttcttcctgccaaccacctctctctggggcatgggactgggcagtctataaagccgtgagtgccccccaagcccacagtccccctccgaggaagccagccagcagctggtcctcatactgagggccaggctttgtgtcctgtgggtctgcaaccctggccataaccagtattggatgaaggacccttgtttaacaaaatgacagtggacttgcttcaaggcagacggcacagctttaaagcgatccagcaaacgaactctgcccatttggggcatgtgatttttgacaatgactgtctggctcaattagacccaacctgggagtgaactctgttttcaacattgtcatatagcttgtttgttattcggacatcccctcgggcttagattccacccccctcccctgcaagccttctctagatcctaaggtccttgaggacagagtcttgctcaatctctttttgtctcccgccagtgtctgggccctttgcatccctttgtaaatgtttgttgcacaggtgactgtaaaacacctaggcccgaggccttcacccccaaggagtcagtttctccacggctccttttccggttgtgtagccatttagcctgagagaggtttgggataggagaggtctctccaggattcctgatgagtgtggatgagcctgctgagcagggtatggaagcagaagcagccattggccagggatgtggttggagggataaacacagaagatgcctgcggctccccaagccagggaggtctgcagctaggggcctggaagatggagacaaggcagtcagagaacaatgaagacagagccagagccatgaaaagtgacagcagcaaacccagagagagggacagagaccaacagagtcacacccaatgaggttcatccaaaccaagacacttccctccatggttgtcagccctgagctcctgtttcctcccttgggttgtaaattcctcctgagcagtggttgtgtttattcatcttggtatccttagagccttgcagggcaccacatgggggctggcacatggtaggcgcccaataataattttgaacctgaattgaattaataaaaatattcttctatttttatttatttatttatttattattatactttaagttttagggtacatgtgcacaatgtgcaggttagttacatatgtatacatgtgccatgctggtgcgctgcaccaactaactcgtcatctagcattcacattttcttaatccagtctatcattgttggacatttgggttggttccaagtctttgctattgtgaaaaatattcttctattaattgacttgaggatttcacagtctctcttgaaaatctatctacagggctaccaaggtttccattaccttgaacgctgacgttcacgccttaaatctaactgtgctttcttgccatggcttaagttcatttctcctccagtggtttcaaatgcatggaatgatttttcagccattcaggaagaaggaatgctgtgtataaagcctggattcaataaagccagatttttgaaaaacagctctttagcatcttctactacagacactggtctgggcagggctttttattttattgaatccagctgaagagcttgactacattaataatgggcttcatttccaaccactgcctcccagtctttccccctaaaagcctcatggtacttaagcaactgctaatacaggaataattgtcagtggcatcacttcctgccgtgatttgaccaccaggatgaggttttcttcttgtacctaatctggagttctcaggcataccatgtctggggctgccagatcatatttaaaatttgtaagcaaatctaatggcagctgtgatttgagttgtattgagtttatgttgagaaagtaggatttgggaagattctcttgggtatgtagtaatatttttctggagcaagcctacctaaagattgcccagaggttcaaatctcttatttctacagagcatggaagggtggtaccatatcacagggtcctgagggcggactggaagattttactccattcatttcaaagaaaactctatttgttcagctcccataccaccaccatacttctttctgaagcttccctggaagatgacatctcaccatcagttttctttacactggacttgactcatgatggatttagtacacataactgtaacatggtatccatacagaagataagctcctctttgcttcaatgaaaaaggccatataaaagcacacacctattaacaggaatatagcacagccactaagagcacagactctgaagagtctgattgccagattgccagagtttgagtctagcttagccactatgtgactttggacaacttccctccaatactttgatctcctcatgtgtgaagtggggaatataatagtgcctactttttaaagtcactatgaagtttaagatgaatggatatttgttaagtgcttagatcagtgcttgtacacagtgctatataaatgactattgttgtgtgttttttttcattttactgaatatccaatacattattcctctccacataacttcctactaggataaaaagtaaagtttctctttcaggcaacatgcaatcaaatttaacagctggccaaaagtttagtaagaccttgcttattacacctttttggcaatattaaaataatatttgtttcaatctaaaggttgcttcatctgctgttatagggctaggcactgtggggccaataggagtgaaatatgtgatacccctcccaaaagaacttgcaatcaaacaatattggaaaatataagaagtgatatattaggtagcaaaacaaaactgaagagcagatgtgatgaactattggagaagtttaggagatgtagacattagtgacagcttgaatggtcaggtgaggaaggtaaggagattttcaggtgggatgagctgagctggaagaatgggttaagatttgggtgatgaaggtaagagtgctcccagaaggtaaagatacagacagtggtaaggaagggtggccagccatggtgactcacacctgtaatcccagcactttgggaggccgaggtggaccaatgacttgaaccgaggagttcaagaccaaccttggcaacatagccagaccccatctctacaaaaactagccagacatagtggcacatgcctatagtcccagctactcaggaggttgaggcaagaggatcacttgatcctgggaattcaaggctgcagtgagctataattgcgactgcactccagcctgagtgacagagcaaaagtttctcaatttaaaggaaggaaggagggaaggaaggagggatggaaagaaggaaggaaggagggaaggaaagaaggaaggagggcagagtttgggggtttgggagggtgaaggcatggaaatgaaggctctggtgtcttccttggaggagcagtgaggatgctgccctagtggtagccaaggattaattgtgccaagagcatagatggtgctagaaaatcaggcgacagtagctggattatgaaggtcttcacaaagcaggcaaatgagttcagatttggtttaatagaaaataggaagtgagaaagaggtaagaaacacgatctagaatgctggccagctgtgtcacccgcgtgcctgcctgcaccagtagtgtccccgagctgggcctgacaccattctttggtgatggtggaataaaggcaagttgaagaaataaaaacatgttcatatatgtgagttcccaagacaaaccacagcagatcccaggaatgtgtttctgattgagcaatgaagacgtgttggtggggttttggttggggtgggtgtgggtgtcatctctgtttcatgaggtctaaatttctactggctcagaaaaagaactttgagcagttttttgtttatatgggtcatcatcgtcttcaatttttgtggagttttctcagagcttcttgatggtctgctaatactaaaataaatatattaggccttttgcctgtctcttcttttctgtcactgggtgatggcctttgtttcctctaatggacacattccagatttgagtgcggagcgggcagtccctggctgctcatgtctgacatcgttccctccctgtgtagcaaagggaaatcaacagcacgtgggagggggaatctgtgttctaagaactgctttggtttacacatctatagataacactcaaccagcactgcaggtcacatggaccggctggtgaggctgaggatgagtcacttttaaattactcatagagaaagaaatatgtttctgaaagccagagtggttggcttacacatggaggtaagagagaaagcaggcagcttcataaagcactcagacctcctgtgacagctgacgtggtgtgtagtgcgtcaggtgggaagacggggccctgcgtcctcagcaatgtatttggaggtgaggctttttgttgatgggaacccctgtgctgggacttgggggtatttaggatacatttccatctagctagactttctcttacagtcccactttgtaaatggccctaggacccttgattaactttcagtaacacagtctagtggtgaacaccaagccatctgaggctgaaatatggagaagtatgtcagtccaacagaaggtcagatggggaggggcgagggagctttcagaaagtcttggagtacaagggcctcagctgagcctcgaaggtcttcattcgttgcaaagaagaaggaattctgtcccaagcgagatggaaagatcatctgagcaaaaagaaagcatcagtgacagaggctgcaacttcatttcactggctgagtctaaatttttttcacaggaaaaaatatacagaagacaagagaacaatcaccaaggaagcccaaggcactgcttactaaattggtccaagggggggatttcaccaaatgcaaatgaacaaagaacaatacatgtgactcaaaatatccgttatgctcttaatacttacgagagggtgtgaggcagggaggtgaccttttcaagggttgaaagctgtcaacttttcaaccacattgttttcattgctgggagattgaagacaggatcacctcagggtaccattttggaaaagtgatttaaaaaaaattaaaaactccttcctgcataatgttttgggacattttgaattgtttttgccgtgaagacatagaattcaggtgtccaggaaatactgcaaccttttatgagaaatgaatacccagaagtctagagctgcctggcactcactctggcaggtcttccacctctggtccctctccagcagaagggctagtgagcagtttaggacccctggagcaggggtacccnttnnancccccaccccaaaggaagcgatgtggcttttttctcgcagccccgcccccatccctttgacaggtcactagaacaacagagtgcccaagtggagacagggaggaatgtgatggttggagggacctaaaaataaccatttttccctcatcctgaatgtgctaccctgggccagacattccctgaagggctcctctgaaatctgggaaacaggaaatgctaagaaaatctctaatttgcctggtcatgtgaactcctctcggtgttgaaacagaattttggaagaggggactctgcactgtggttgagccctcctaatcagagaacatttgcccctatgagaatatggtggatgtgactattcagcctcaacttccctctttctaaacatgtaaactctgatgcctaaagaacaaaaccagaaaagaaacccactcggtcttagttgcgtatctgagtgccgacagggcggctgagaggggcccacgtgcctgtcgctaaaaagcccctttggcatttcataacaggacccaatcccgcagacttgtctgtgcaggctcacgcaccatcttcaaaacctttactacctgtatttgtagtagatgattaatgattaggctttcttcccacacatttggctttgataatctccactcaaaaatattcagatgcaaataatttaaaaacaaagtggctccaagggctctttctgggaggatggaaatgctgcatatcttgataggggagtgagttaaagggatgtatgcctttgtcaatattcataaaactgtacacatgatatattcattttgttgtatgtaaatgatactgagaatgaaaactcttaagataataaagtgggttgagtttggaaaccagaaaaagtggacacgatgtaaatgaccccgctgaaaacgattcgagttggccagcagaaactaagaaatgcgtacgcgtgggcagtccccactgtgcggggaaatctttgcaaggtgagcagattcagctcagctcatagaaactccagctgattctgcacattcatctgtgtttttgtaggtgtttttggtgtctttgtgtccatttctgtttggctcatttccctactcaattggattttgacttctatttcctgaatacaacacccccgcaatacctaatatcccaggcctgtgaaaagtgaatgcctaataaatgtccactcactcactgagatggactgcttctcctgtctctgttacattctatcaaaattagccagtgcatttggccctaaatgcatttgtaaaaatggaaagtaaaaggagaaacattcatacttgtactagttttgagaaaattcccagttatctctgcttctaaaagaaatccgtttcagaacttttacttgggaaaaattgcttttgcctaacaggaaaaataaaacatagactccagacgcagtgatgttcgtgtgaaattaagaaaacagagttaatgttgatgtcttagtggaggcgaaggtacgcttcctttctctctttttcccccttttcaaggcaaatcagaagaccgggtgtggaaattcctgcaggtttgctctgtgtcggtttgcacgtttgtagatggagtttcatgctttttctcactagtcagtctttttgtcatcatctcatcttgaaactagagaggaagggaatggaagggcaaattgctaatatcagagacctctggaaattccccttttatggtacatgagtatttaagaacagttctctttcagttgtgtttttgtgattttggtgacactcagtgggcccagccctgcctctagtcagactccagtgtccttcagcagctctctagggcatgggctggaggcagtgggatggggggttaacgtgaattgcactgctttggaaaaacagcccaagagagatcctttttttaaagtagataacctgagcataaatctatactcacatgatttttaaaaattaacttatctagcatcttttataaactgataaatctctcatgaattaatgactcaccagtgcctaaatggtgggcagacaggcggcgctataaatttctcttggcattttgtgtgtcattatatatgataagttccagtaatggcctggcttcattgaaggttattttaaaggaagaagctttttatcccacatggtttcaggcaataccttattgaagatgacttagaccttggattctggggttggaacaggcttgtgtccactgcctaaacagggccagcacagcttcgtggggggcctctggaggaaggggccccaggaaggagtcaggtctttctgctcactggctgtcaggctgcctgggggtctcggagggtccagagcaactgatggctggtgtggaggagagcgtgtgacagccagtcccaaggccaggctatgagagactatgctaattagtgaagtccctggtagggccaggtcactcggccaccaggtaaaaagtaccaggttatttctgccttggcagaaggagaaggtgcatgaatattactcattaatacgcctcaaggaaccactaggttagacaacaaaataccttctgcatccactcccctattacttcctcactccccaaacatcctttcagtctgctcctccagcttgagaaaccaggagggtcttcctaccgagtggtgcctcccgagcctctggggtacagcttgtgaccctcctcaatcaaatgaatcccagggttccaggccaggtgagtatagatggacttggagcttttcttatgaaatgtcttgagctgagtttctttttcctgctacgccgaactctgtatatgtttgtttttgttctaattttggcttcagaaaaaaaaaagaagaaaagaaaagaaaaagaatgtttgggtacagtgtaaaagttttctcagatccagattggaaactccctcatcactctgaaaccggacaggtgctgagcggtatttgtttctctgtcaataaacagcacgtacttggcctagacataaactcctgcgggagcagtggtgcacatgggcctatttcagtgtttgggaaggactgaagggccctgaattaggaggaaggtctgcttctcaccccttctcttttgatcttctgatagagaccacatagtgttctcttcatggtattttgatggcatatggcgtataaacacaggtgtgacctttacacagtgcactgcgttacaattataataagtgagaggagataaagccagctggagtttaaggttaacgctgaaaacagcgaacgctaattttcactgaaaacaatgtcacagagcaaggcgtaggtgccccttttcaactgcncngcgtgcatggttctatgaacagccccaggtgaagggtttccatgaaataagccacctcctggggtacagaaatacttagtgatgcatcctctgaggatcccctttgggaccaccctcctgggcggcatatcccaaatccttgtttggatgggaagggagcattaggtaacttcacttggaacaaggtaccatgattatgtctggtcctgttttccgtgctgacaggcagttcacctctccgggactcagtgtccttgattttaaaataagggactttgaccatattccttcagtttcttgccttctggttttttacacaagaggctcagcccagaagcctaaccccagatgcatacttaattcctcgggaaaacaaaatatttgtcagacccacaattaacttaattgtttatttgtgcaaaggctttcttgtttagttccaggacttgctgttgaaatttgaaaaagggtggccccagattcatgttcacatgagtagctgcggtagctactcaccagctagctcctgggagagaaaatggagaagaaagcgagggaagaaaacggagggcaaattctccaaggtttactcctccaccagagagacgcctcctgggcaagcgtttctacctggatccctggctgcccaggaaattggggaatgagggctttgggtgtggagtccccttggccattatgaagtccatggggttgcagttactgagcagagttagaggcattcctgcacccccacccccaacccacaacgtctggacttgggaggagattccttggcttctgaaagaagcttctgtttctgtttacgtaaacatcaggtggacgggggaggtggacgccagggtgggacgttcttgcagtgctcagatgagggtgagactggaggggccagtacaggtgttgggcatttgggtagcacctaacaataatctaaggcagtggttctccatggggatgactttgccttccaggggacatttggcacggcctggagacatttcgggttttcacactagacaagggtttccgctggcatgtcgtgggcagaggccagagaagctgctaaacatcctccagtgcacagggcagcccgtcctccccacaacaaagaattacctgacccagaatgtcaattgatctaagttctaaagcctactaatagtttgtaagttgaaagcactagattgacacaaacgggaaaagttatttgcagtttattttcctgagggacaatgggctgccactcccttccatgctattgctgggcaagactctatgttggctcttgctttcttctcctctttgaacacccccctcccctgccagcccgtctgatgccgtccaagcctttttttttttttttttttggcttctcagcaagcctcatgaatattaactgggacactcagggctaaaatgatctctggtcttacttgagaaatgccctcaagcaagaaaaagaacaagagtcccaagaacaccaagtgcccctcaccttggtcacaccaatggcccacactggctggggaggcggggaagggtcctgggagagggaggatgggcctctaacctccaaggagaacatgagtgagggccccaggaagggagagggtgcgacaagcactctggagaaagaaaggagagggttcaaggtgaccctgagctcggggcaagatctgcagggcctgcaattggcagagtgcctggcatctggccaagcagccctccctctctcttccccgctccaccacctgctcctggtcgctgcattgccggttcctcccagcctcttctcacctgctcgctctaacgtccgtctcagccaacagccctactcttccctcccaagccaacagggggaagcagagagcagcagaacagcctaaaggcaacaacggcagtctctttaccgcgcccaccctgcactcctgggcccctgtggcctccaccccagcagctggaccctccgagaccctccttttcccaccaagctcacccccactaagggccctccccacgcaatgcacagcacattccacgcccacccgacatcaatcacgtcctgtctcgtgactcatccgatactgttgacttgctgtacagtttctcacctttgcaaatgagatttgtcgcctcctcaagttgactgtccctggaggccaggagacgtgctgtggccctgctgtcccgagcctttctcagagtctcatgttcagctcagttctgttgattggggacaaaggacactgccatttgccacctctgcccgccctgtgccgacctccaccagacgtttggcatcatgagcccgtgtcgttctcaccccagcctttgtggttgatgttgtagcgtcctcttattcttatagatgaataagttgaggctcagagatgttagatatcttgggtaaggtgaagctgtgacgacttgagaacataactgaacgttctaggctccttaccccacacggtgttgccattccagtcccagaaggtcctgaggttcttttgagatgtgtaatgaatccatcttccttgagcataacacaatctttatggacctgtttaaatagttttaatttccatgtgtttactcattcattctgcaaacatgcacacagcttttacaaggtgccaggcactatcagaacctgggaaaaccaagatgaagaaaatgtagccagtgcccccaaggaggagagagacaggtggcagtgagttcactggtgagccttgagggggcagaataagaaaagggcatgatggggaggtgggggcttggtcaagaaaggcttcacagaggaggtggtatttgagctgagtgtggagaggtgtgcaaaaggcagagtggcatcccagcctgaggatgcatgtgagccaggatctgtagaggaacgaggctgcagctgatgctgccagtaatcacatggagttcaaggcaagcagtgggtgtggggagaggggagtctggaagcgtgggtcagggccagctcgccctgtggataacaggagccactcagggcatttggataagagagagggacgcaactgctttgtgggtctagcagacaccctgggaatactccagagggaagctgaatggggcaagatgagggaagatcggttgggagcttcttgccactgtctaggtaagccatgcagtggggtgaacagaagtggcttctgtaagaccagaaagaggagacatcctaagagacttctgtaaggtggagatgacagtgatggtgtgtccataggaaaagaagagggaggagttgaggatcaccccggtttttctgctaggatataggctgagggctgtcaagggggctgattagacccttagaggcagattttgggaaggtgtaatcagttccctttgtgctgtgttgggtttgatgtacctgatggatatgcagatctgtttggtcgcaaactagggtttgaggttcaaaagagattcaagagtcatgagcctaaaggcttcacaatagggttatagcttaatcctttctgtactatgaagacttcatgaatgtcccaaaatccacattcaggcctgcccttcccagagtcatcattgtcttctagaagcctagtttgtcccatttcagctgccctcctctggactcaccactggctttttggagtggccaggtctgtgtagagaattctgaatggaccattccaggtggggacctcatggcttagtacaaggtccgatgttcttgctgttgggtaggaaatcctgccttgatgagtctcaggatttggctggccgctctgccctgacgatttcaagaaatcacttctgctaactccagaactctacttccaggcccctagctgataatatacaggtattgagcttcatttgaattttttctttaagaacttaccttgactaaagatgttagaaaataagatcctaaaattaaaaattacggactctgcaaaaagagcttaactggcttcaaaagtttcacacaactcctttcatatatgcattttctgtaagctacttgtaaataaagaaggtacctaggaaaggaaaattgccatctctgacagttcaatgcaaaaatgagagaggaatgagagggagtcatgactgaattttagtgcctttgctgccaggcacttcacagaagtcatttcatcctcctgaccactcgacaactacagccttttatttttctctgttttatgaattcataaatttaggctcagggaggttaaataactcatctaacatgagttagatttaagcattgcagagaacgagaggagaactgataactcattcaactcattgacgaatctagtaatttgcagagttgaggttcaagcacagatctgtctgactctaatgtgtgtgctctttcctctccaatgctactagcatgggtgagctgtgagcattctggagagggtgaaaagtgggaggcagaggcaaaagctgagtcaaatagttttctcagatgagagagagtgggcaggcagtggatattcgtgcaagcaagttggacgccgtcagaaatctgagctgaagttatgtgggtatactcacgtcttgtagtctccgctgaaggacccattatcaaataggtggaaaatacaaaaattgaagatatggtgaagcattatcacctgatcaacccagcatcctgctctcataggtggtgtacaatttcacccagcccaagtcattatgtcttccaggagaaaaggaggctctagtaggcactgaggacaagcacatgataagctattgttttgcctcctgggaatacttggttggccctttattttttagtagcaagaagatttaggagtagcactctgtatgtatgttgattgtttggctttgtacacaaatgttagaaaattaaagaatagatttggtcattgtcatgtctgtttgccctcaccagacttgacttagatatggttctttaaagtctcaggcattttagaataactttggggaaggtatttacgaattaatttttaaaaaaactctttcattttagaattttcttaaaagagatatgtttttaaaatttcaaatacctagaattgggcaaacgaggtgttgccaagtagaggctctgctgagcaaataatgaccacatcaaaacaccagccccaaggaagcaggctccgattctgctcccagagcagcacattggtgtggtgtcaaatgcatgtttctaaagaactcaaacattgttttctcttagttagataaacaaactccttgatgtctatttatgactagttgttagtgagtctcttggaagtcatacaaagcagtgagaacaagaaggtgttttgcaggttggctttgagtaaagaccctctgttttgatcagggtcttggatgccctgctcaatcccctactcgaagttctgagggcatttctctgattgtcctccaaaactgtcctgccaactgctatagattaaataggtaaggagcagctactaagtttccttcttccctcccatgaaggagcccggccatgagatttagccaatgagcccatttaactctctgttttctagctcatttatccaagggttcagtgcaccactggaaaccttcatataacagaaagccagtgtttggggggcatttggtttcaacttgcttgtgtttgagcatttatatttataatagtgctaatctctaagggactcacatcgcattaagagctttatcttaggctgccacggaaactagcatgtaccaacatgactgagaactatgagaaattgggctgggcctacagaaaattaataagctccgattttcatttaaattatcttttccatgagattttgttttgaaacccacaaagtcgggccaagccattagcattccctatgcacacatttatcctccccctgtagcctatgctgtcccctcccctcgcccccagcccctcatctgttatcgccccccatctattatcgccccccttgcctgagtgaactcgcccttctctgaaccgtcatggccaccccttctgccaccaggacattcttgcttgtattgcttgctcctgacctcatagaaggaaaggagtagttgcatttttctcttgaatccaccccagggttttgatcatgccagtcatgttacagatgcccagtaatttctgctgggttagatgttagtcagttgcagggtagattggtgttaggggaggtagcccggccataggcaaaaaagtagcttagggtcaccgcagtcagtgtggagaagggaattttggggggaaatctggacagacgaatttgaccaatctatgaggctaattatagaaaaaaacacaagaagggggaaaatttctttcagtaattagagagatgacagagaagcagggaatgcccctgattgcattatagaagaggagatcaagatgacttcagaagtcatttgctgaaggtacaaagagagctcaaggtgaaaggagtcccattttccttcttggtggaggcgcagcttagtaacctttgaggagtgttgcctgtcttgctaggaaaaatatgacaggagtagcccagtggaggttggagacctaataccccttctcacccccaaacctgataactcattcttaagcatcaaatcttatgttatagtccaatatttctggacatttttctgccacaaggtctccagaatgtgttagcttagcttcagccttataggaattcatatttaaatcgacttcttttttcctacctggagactgctggaatatcagactaaaacagctcacgggaaggctgagcagagtctaattctagaacttgtggcatgttcatgggacacggaaaatacatagaagtgatggtttcacagagaaagggaaaagtcactccagagaaaactggagggagccaagaaaatgcggagagaaagtggggaatggcaacctcagacgcagagggaaagaaaaacaagagaagacgtacgttagcaataaaagaaaaaaaaccatcacaatgcccgttgggcaggaaagtgatttttctgcttttctttcagccctcctgggcccacagtattgaagataggagcagagtgcattcactggtgtccactcttcagctgggtgttgctgaagaagagagaaaccttagccatcttgccaccaggtcactctctttctttcgttttcaggctgacccaagcaaaataggggaaaattgcatctggacaaaggaaacttctctttctgtacctaaaagcctcatgtcaggctgggcgcggtggctcacgcctgtaatcccagcactatgggaggctgagtcaggaggatcacttgaggtcaggagtttcaggccagcctggccaacatggtgaaaccccaattctacaaaaaaactacaaaaattagccaggcatggcggtgggtgcctgtaatcccagccattcgggaagactgaggcaggagaattgcttgaacctgggaggcagaggctgcagtgagccgagatcgcaccactgcactccagcctgggtaactgacagagggagacgctgtctcaaaataaataaataaataaataaataaataaataaataaataaataaatgcctcatgtcaggagaaccctttctgtagagagccatataattaagcactgtgtttgttccaaacaaaaactagagaaagggttaaaaatcaatattattagtgacatctcctctcttcttcactgttaatcatctgccggtcactgtcataacagtgttatttttcaggcctgaaatgaaaattggcgattacatcaagcaaagagtttgaaaggaaggctgggttactgcatgattattcggactctccctgtaaatacgtgaatagttccagcttcccctcacatgggttgagggtaacagaatgacatctccctgggctagaagagaaacagagacagaacaagcgaaagtcgtctggcaccagccaacagttgcaacttatacatatagcccgggaccggtatgggtctgtggcctgttaggaacagggccgcacagcaggaggtgagcagctggcgagcatcactgcctgagctccggctcctgtcagatcagtggcgacattaggttttcctaggagtgcaaaccctattgtgaactgtgcccacaagggatctaggttgtgtgctccttatgggaaccgaatgcctgatgatctgtgttggaacagtttcatcctgaaatgatcccccaccccattcgtggaaaaattgtcctccacaaaacacgtccctggtgccaaaaaggttgtggactgctgacataaatgagcttgattcttttctcataatgtaaacgttatcaaagagacagaggtgtcagcataagcacgtcgctgctccatgcacacttatgacttcgtggctctgggcaggcccgtttagctgggagtcatagctacatttagggaggccgcgtgattgagtggaaaggcaggatattttatgtcagaattctgggtttgagttctggtttcataattgattaactaggtgtccttggaaaagttacgtattcttggtcatctctaaaagaggggtgacagcagtaataacttatctgtggcttgttgggaggaccacactagatgatctatatggaagcactttctcaacaacagcgtgccatgtgaatatttgtttttgtttgtaatagatacctctataataaggagaatgagaaggttattatttcatcctgtttgttcactgtttttatttaacaactttttttttttttcctactacattccaggcagcaggccagaggccagggaaattcgttgccacttcacagtatctcattgcatcattgagaggtttactcctgatccagcaccgaaagaccatttttggcctttaaaaataaagttgaaagtccaagagccagaaagattaaggattaagctaatttttaaaataacaaatgttttcttatattcttttctcatttatatggtgctggtaattttttaaattagattttcatctgggcattttatattaaaaatgatacagttccctgtcccttgtaattgcatttcttttgattttcttttattatgactcgcatatcactgacacttttttcctggaatgttaaaagtatacatcatctggctaaaaggaaaaaatactgacttaataaaaatggaaaagagagagagagagaaaatggatattcttctcttttggttccaaacaaggcaaagtcctcattcctcgttcttcatacatgccaaggttgatgtcacggatccaaaccagttttgagttatctgaaatgggggggagcggggaagcgcagttcaacaatcttctgaagcttgaaaaacaaatttgtcacagtctgataacccaaaaatgactgatggattttctctgcattttccaagcagggaggggtcgggcatggagaatgaaacattctgagaaaagacttaaatgtggaaacttttggttcaagagggtattctaggagatacaagaaatatctcctgggggcatccaaagggaataacactgtaatcttgagtgatgtatggttccattgcccgaggaatagggatgaaaaccataaactcctttggttggggtattaacttatcatcaaaagttaccataaataatggatattgtttatggctgagaagtaggacacatccagagaagacatcccttaatttttcataaaatcatctcagtgttattggaatatgtttttcatgccatttgagctgtcggagtatctcttgggtagattcttaagcagaaatagttgggactttacaaaccctgcctgggattctaatgtctggtgccatgaagattttggcttgtgtttcttttgatgtctagaatatcaagaacattcctagcttctatattacggcaggtcacgtcccggcttcttctagtaaaatcccctctaggattcaagcctctatttgcaccggtaataaatgtgatggcacattgcgactttgaatgcaagccagcagggctgcaggcacctgtttctcccagtgccccaactgtatcaaacccttttcatcctccctgcttttgatgcacaaacataaaacggagtcccagaatctaaaagtgatgtcacttgagtgtcaccaaggacctttagaggaccatggggcatctcttcctgttacaaatgaggctctcaaagcctggaaaggtgaatccctggaccacaagtggaggaactgagaaagggtgcgtcgacactcagaccccacagcttgccattgtgtggcttgtgatagaaccaagacatcagaacagaccagcttatccggttataaatctaggataacatgatgagcttcagagccaggggttgagctctcctgggactcctcccctccaaaggatgtgttccattgccaaacattaaaagctccgaattcttgttttctcgccaaaaggtattgtagacatgatggcagtgaaattatttttttcgcatttaaagttacccttaataaaatcactttcttcaggtggtgtaccaagttagtaaaacatacctgtttgaatctatattccatcaaccatgaacttatgcctggggatcaaaaatttcttaaaacccaccaggcgtgatcctaatacttttttcacagtttctcggggtgtttcagtaggttaggattacctccaaagacatttaaatgatgtttctggttcaaacggaaatgaaaagcacataaaattgtaagacataagaattccaagaatttggcagaggtgaaaacacacaaagaaaagatgaaatttagacgtttttattctgctcctttatccaacacaaatccctctccagttgtcccataaccacaatgccagcatttaactcctcaagggttaaaggaggcttgtagagcgggcctctggctgactccagcgtggatcgcaggcctggcgtcctgtcagacttccacggtcaaatggtaaccacactgcctctagttacctcgctccatttcttggggggctcagggacagccgccatttccccatcagtgtccacgaccagcgtccttctgccaggaggcgggctggaaggtccctcgcagctatggccaagccctggctgcggctgcagaagtctcacttgtttcactcggccaacacttaatttctttatgtatctgagggagtggggaattagtgtcttccaggaaattcaggctctgagttttctgtcctagactacaacaggcaaatggagaacgggttgtggggatcggagctgaggaatgaacttcagctgataaaatgcaagacaaggagggaacaggaaagcaaaggacaaagtgaaggagaaaaaaataaagggaattttggcagggaaaagggatttgggagataggacgggagtcctgtctgggttatagtgaaggcaggggagagaggtttgggggatcttggggacctgggccgtgtccagccattttttgtctcccaccaactcctcgctgttcagctaccccacagagcagggtcttgggcatcctgtgtgctgaggacagagctgagcttatagtcactgtgcatgaaggatgctgtgattctgcttttttgtttgttcatctttaatttggtgtattagagatgttgcactgaacacattccctctcagcatgcaactgccaaaatgctgaaagaaagtgtttggcttgttgggtctgactgcaacaatcacaaacttgccttgcaaacttctggccttccagtaacacatcgaacattaaaggattaaatgcttggtgagcagagctaggttcttgtaaaacacttggcaggtaggttcctaggaatttaaaggtatctgcctttgttaaattatgaagattttttaaatgtgagtagagaaaagctgtttccagtcatgaggagtcacgaggggtgcctccaggaggagagagaccatgcaagaagcaggtgacggggcagtggggcgagcggcccagagaagcccccccnnaccccctggatctcttgggcagtggggcgagtggccagggaagccccctgtatccccctgggtctcttctttgagggcttatgctctgtccgtggtgtggagccactcttgttcatgcacgttgcagacacaaccacttttggtccagcaagaatagttgagctgatcacttgaaaggatcaaaatccagttgccactgtggaagctctggggccacatattttaatattctaaattaggcctcaagttggatttgtttttgtgactcaaggaaattttgttctctttcacattctagaattccctgtgaagcagccctgtaaataggagggcttttcctgaataatatggaaagaatttctctttggggatttgagtctatatcatacaacattttaaaatactcttgagatggcacgtgcagccctagcaacagggccagaccacagtcaagggcttccagagtgtgccgcacacgttcccgtgggatccagccttgcacagtgcccagggcggcgggggcgggggtgatggggaaggtcctgtgactggtggtttctccatggtcacagggtcttctttctgttgatgtggccccattcgctctgactcacccctgacggcatacaccggcttgctttaggacccaccagggtggccccaaactcccatgccacttccttgccctgaaacaccatccttggttttcttgcttttatttgaagtcctgaggcctcagctcctgtctcactttctgtccgccttccagcccatcttaaacactcttggtacatttcttgagcgttccctgtcactcctcgggacttcctgtttagcctctcatatttattgctccgggggagccggagttggatcttgtatgtcttttctgcttcctttgggagaagcaaaatatagttgaaaaggtacatgcctggcagtcatatagtcctggattcgaaccccggctttgctgcaatgagctgagtgactttgagcaagttgtgtgacctttctgatggcagtctcttctgtctagagttgtttgtaaaagccaccttaatgggctttggcaccacagttaaatatctcttgtcatcccagatttagtgcctagccagaagtagatgctaaataaatactttttaaagtggtttgcctatggttggattgctcgattcagatatgtccaaaagatagatcaaagctagaggaaagaaagagctaaaacgagctatccaaagttagcgccaattatactatgaaaaacatgttgcctgtggatccaagattggccaaggggtttcctcagtggaaatagcaatttgcttgacctaaaatttctcttgaagccttcaccagcccaaacttgagcttattcctacgaccttaggtgtgcatatctctgagtcatcccattggaagagcgtttactgagtacctgatttgggtgatgagcatgatgtcctgccttaaggagctcattgtcatggagtcaagctcactatctcccctgcagcactctgcacaatgctgtgtgcaactcaggcggtcagtaaatgtttgcatccctgaatgcaacctgagccaactcgctccaaggtttctgcaatggcagcaaggttctgccagtgctacacatgcataggcatggccactgaccactcagctgccagtcccacctggaatattctggctctgccatttttgcctgaggaatagtcggtgtataaaggccccgtagcacagttcaaattccatttgcaatgcagccagcacatacttgcatcccttctgcaggcagggtcccccaggctcgccgctgcaagctgcaaaagtgtctgaccggtcctgagcgtttgacgggaagtgacagttgccttggaagtggatctcccaggggcacgacttttctcgtgttaagtgcccactgctgacaatgctgacaggccttgtacagtgggcacgtgtagtgttctgaccttgctcctgcccccaggaggccagcttcactggcttcactgtgagagcgtgtccttgggtcaggtcagccagctgtcaactgtgcccctgtaggttgtgctgatggaagatatttcagcccctccactcacttaaaactcatccatgattgctttcagcttctctttttctctttctctttgtctttctgggtctctgggtctcccgtttctctctctgagtttctgtttttgcttctctctctagttctatatacagcagtatccttcttgcaacagaaagcatactgtcagaggtccttcgccgtaaacagctattcagatgagaggccacgccagcgtatcttgtccatatgttaatgagccaggatccagaaccacaggctgacctggcccaccatttacctgtcctggtactaacagctgctgccactgacagagactgcattttccttgtgatagagaggtctgctgtcttccctgggcacaggaagactgtctgatgaggaaggaagaggattgtcaaagagccaagcagtgttccttgaaatgcatctggttttattcatgttgagtctttccaggtgaactgaactaaatcataaactacaaaatgaaagcagatttttcttagcatgcccatatggagctcactgaggagttcaccaccatccgtcagctccccttgtcccccagagcacagaggatgtaattgttcttctcttcctgatcggtagattgatggtgtggataagaagcctctcccatgggcttctcagaggatcatcgcagtcactttgacggtcacagaatgacccattgagctgcagaactggggagctgggatctgagtaagactattatacgttggggtgcttttgagtgggatgtaagcaggctgtgaagtttcagccatttgtgacttacctgccccaaaccaagaacaacagaaccagcaccatccggggtgcatctggtcctcgacagatgtctgggcctgcggtaggtcatcagggctccctggagctaatgcagtgtggagcttccagaaaagatgcccaggctgatttcttaaccagtcccaaaaagcaagtgccagacaaggcagggctggaggctggcagtgcccagctggctgaggatgccgcatcctccagcctagtctgctttgctctttttcttctacataccctcctccaggtctgaggccactttcagcaaattcctattaggacatgcaggttctttgtactccccacaccaccagcctcagtcaacacttactgatttaaacaagtgaaaaccaaacatttggcccctaactctggccctccacgtttaataaatgaaggactccctcccctcactgcccccagcagcgatgtcctgatgacagcgattaggccaagctgcagaacttaacaagcatctgctttcagttcccatttttggcgtattttcatgaattaactcttgcagtgacaaaaatagagggaggcagcctgggccatgccccgtgttcacgagtcacatggcaggtacaggagccacggcacgcttggcccaaatcatgaccgacaagtagagcatatttgcctgtcgccaatccctgtggagcacacagtgattatgttctactcacatacggagacaggtatggacagtggcgtggggtggggaggagagccacatgtgtggctccagatcccaagaaaaaagagttggtggatctattccaaacgccagtctgcctgtggaatccccagcccctgtcaggcagtggagagtcctgttcggtattgaatataatcagagcttcccacctgctccctactttaagccacactgatgtcaccagttctaattaaaactggcatgagaggcagagggctttgtgggcatatgggggttggggtctgggacaaataacttggattatgctcataaaagcaaagagattggaagcacagaggcacatcagaggtcacagcttcagtgctgtgccaagaaaggcctcctcctaactcacagcaggagggtctgaggccaggtggggagaagagcagtggagaagtggcggatggaagagatggaccacacagagaggaagcaggagatcctctgcaatagttacagtaacacagctctggcacgcaccaacagaacccaagtcacatcctcaaggatgcacgagaaagggtgaagaataaggtcactaactaggtaagcccagatggtagagcggagagagacttcttagaggttcgctacggcggagttttcagatgaggaaaattgaaggtcccaggggtgaagtgagctgctcaccttacaagtaggagtgccccgattgctgctcatgcatccgacccctaacttctcatccagaacacaaaccatgccacctcctactacagttcttcctttttttcttttggagaatgacagtggtgcacattttctaaccagcagcgtctcattcctcattacacttgtgagccgaggatccatcacaagccagtacttctgtggaattccatatggtataaaaatagtttagtccctcttcatgtcgtgtaaggaacataattaagctcttttattgggatatagttcacgtgccataaaattccatttaaagtgatcagcgcattggtttttagcatattcaaaaggttatacagccatcacccttagctaattccagaacttttccatcactccaaaaagaagccctgtacccattagcaatgactccctagtctccccgtctccccatctcctgggaacctctaatccactttttgtcttgatggccttgcctattttggacattgcatgtcaatggactcatagacagtgggtggcctttgtgcctggatccttcacttggcctcatgtttttgagggtcatccatgttgttgcatgtgtcaatgcttcgctcctttttttggctgagttgtaagattccattatgtgggtagaccacattttgtttatttgttcatcagttagtggatatttgggtcatttccacttttggctattatgaataatgctgatgtgaacatttgtgtacaagttttcgtgtgaacgtgcaatttcaattcctttgggtgtactaggagttgaattgctgggtcatgtggtgactctgtttaactctttgaggaatcagcaaactgttttcccacaatggctgcaccagtttacattcccaccagtcatgtgcaggggtttcaatttctcaacatccttgccaacacttgttattatctatttttaaaattagagccactctagtggatgtgatctctccttgtggtttcgatttgcatttccctaatgactaatgatagtgaagcatctcttcatgcacttactggccatttgtgtaccttcactggtaaaatgtctaccagaatcctttggccttttttaaaatttagctacttacgtttttattgttgagttataataattaagttttttgctggacatattttcatgtccaacacaatatcataaaagtgttaagtttgtcactttatgcttgatacttccccccgaaacagtgaaatagcataagcccaaaacaagagagggctgagcaccacaacaggcagggccctcggaagctctagccaaaagaaggtaatggaatgaggaaggtaggaagaaaaatgaagaaacttcgttttaaagccaaaacactggaaagcaggtgactgaggcctgtgtgtatataggccctttctttagggcctcttcaggtgtgccttaaaatgaggacaggagcatgggcctgttctctcctggcaaggccactgctgggcaaatgggcctgcagacaagacacaaagtgctttgaattcagtactaagaaaattatcaggcccatggaagccactgggaatattaccaagcagttactatagggcagggcatgtgtcttatttagctttaagctaaatactcagcaccttacaaaaatagtttggttactgaatgaataagcccgctgaagatgagatttcaaggtcatatagatacggcctttagtctctcttgttatggtttattacactaacctggtgaaccaaatagcataactattaacatatttttagcactttttgctataaatgcatttctccacctatttcagaagtacgtcttttgaattactggactgaccacaccttcttgcaggagggacatgagcccacaggtgccctgcagtatttgcatagctagtgcggcagtagggaacttggttctgtgcttccctccagacaccatcttctaccccagcccagaaggtaattagactaaggaatcctctgaggtccatctctggaatagccagctccggctgaagtctccattagcaggtggttggggccaagctt

SEQ ID NO: 32 - DNA, 160170 bp, Homo sapiens
  modified_base (746)..(746): a, c, g, t, unknown or other
  modified_base (7125)..(7125): a, c, g, t, unknown or other
  modified_base (8540)..(8540): a, c, g, t, unknown or other
  modified_base (11838)..(11838): a, c, g, t, unknown or other
  modified_base (11841)..(11841): a, c, g, t, unknown or other
  modified_base (11847)..(11847): a, c, g, t, unknown or other
  modified_base (26041)..(26041): a, c, g, t, unknown or other
  modified_base (26855)..(26855): a, c, g, t, unknown or other
  modified_base (34208)..(34208): a, c, g, t, unknown or other
  modified_base (79735)..(79735): a, c, g, t, unknown or other
  modified_base (91627)..(91627): a, c, g, t, unknown or other
  modified_base (93823)..(93823): a, c, g, t, unknown or other
  modified_base (102478)..(102478): a, c, g, t, unknown or other
  modified_base (102481)..(102481): a, c, g, t, unknown or other
  modified_base (103460)..(103460): a, c, g, t, unknown or other
  modified_base (103581)..(103581): a, c, g, t, unknown or other
  modified_base (111433)..(111435): a, c, g, t, unknown or other
  modified_base (115727)..(115728): a, c, g, t, unknown or other
  modified_base (115730)..(115731): a, c, g, t, unknown or other
  modified_base (115733)..(115734): a, c, g, t, unknown or other
  modified_base (120785)..(120786): a, c, g, t, unknown or other
  modified_base (120788)..(120788): a, c, g, t, unknown or other
  modified_base (120790)..(120790): a, c, g, t, unknown or other
  modified_base (121601)..(121601): a, c, g, t, unknown or other
  modified_base (121603)..(121603): a, c, g, t, unknown or other
  modified_base (121605)..(121605): a, c, g, t, unknown or other
  modified_base (152423)..(152423): a, c, g, t, unknown or other
  modified_base (152427)..(152427): a, c, g, t, unknown or other
  modified_base (152431)..(152432): a, c, g, t, unknown or other
  modified_base (152589)..(152589): a, c, g, t, unknown or other
gaattctttcaaatgtttgttttatttcataaccctgcttgctgatgccctgagcgtgggcttgctctgttgtttggtagcccagtgcgggccgtaaccttgctcttagcaaacagcttccagctgggagatgtgccccttggtcaccaggaccaaacccagttactagttctgttgatgccaacaagtctttcaattacagcgatgggtacaactggtctgcttagaatgaacttgagcctggagcccagagacccaggtgccagtccaggctctgcctgcaactgaccagccctctctggactcagtttcctcatctgtaaagttactagaaggccaccgtggtcgtttccagcttctgcaggccacacccttgctgtcatgggattcaggccaggcctggacagcctgagacacctctgtccttactgcttctggcttagtcctcatcccagagaaggctgtgggtcaagacagtgccaggaggttgggcagccgtccactcccaaacccaaccagggattgggatcaagcagggagcggggtacactcaatgcccacacctgatgtgctaaccactgggtgaattattttcacttctgtgaacaaggcctctgctatcgcttcaccaagaagccggccacatctgaaaaccaccggtgttgcgagttgtcttatggaaagtggaaacaggcaggatgtggtttgaactgacaaaacaccaaggcagcccattcctcaggagngggctttaaacaatggcatggagaatgggggaggagatcatgtcttctgacttggagccaactggccattaaggctgggccggcaaacgagctacttaggaccaagatggtaaaacaacaacaacaacaacaaaacacacgcacarcaaccgagaaacaaaaacaaatcaacagtagtattcctcctttcagtagtaaaactctgcatctatacagcaactcccacactgaagatgctttcacactcactaggtgcttgctcttgatgacctgcagagacaggcggagctgtgttaatattcctgttttggggataagaatcctgaaataggatgacggctgtgaagacaggaagtgtcaaagtggtcccaaaagccaggactcctgaagcctgaccccaattcagcatctagttctcctggccctgtgtaaacacagccccattcgagaaaggcagcacttcctgtgacaccacagcacacacccccgccttgggttgggggtgcatccccccaaatggatgctgcgtgaaggcagagggcttgagggctttaccacatactccctgtgcctcacacctcgctgcccattgagacactccacaaagtctgataaatgaacaattaattataaataatgaaaacaccgagaggccactcatctccaaagatttaggtacagaatttgcccagctgtgataggatcttatgcggaaaaggtttctgtcttgcctcctaagccagttggatgaaaagtcttttccttggctttcctggaaaggagaaacattaatgtgaaaagacaggagtgaaatgagttcctggaaattgacagtggtccatttctctgcaccttagaatttgctgcgcttgactccyttacgtgctggtaccactcctgtgagataacagtttccctgtgttccatctgcaaggaccttccttggtgtgttggttgacatttgatggctttgctgagaggtattgttttgaagaaggtaacaatcctagcgctcttgttgactggctggcttagccacatttggggtggttgttcttctgaatgactgtggggtaagggacacagtgtctcagagtctcagtttcctcatgtctaaaatcggggcgatgataaaagtgtccatagcgtgggttagggttaggtcgtaaggatggagtgacgtcatggyggggccgctgggaacagtgcctggcatagagcaagcgcccaataaatagcagctattgttactcttgcagggttctttaagcagcataatagtctttaaatcataaaatctcagcctgcgttttttttcctcatagacattatccagagcagcagrccttgtttaatgtttccctggcttccttccctctgttttcagtctctggggaggagtggaaaggaaggacaatctcatgctgcaaacgccacctctgcaaactccttggattaattcacagcactcaactgaaatgactttttatttttagcacacatgagtatttaatatatgataaaggttacaccgcgcatcagttgggaaaggaaggaccactcaataaatggagctggaacaactggctaattatttaggaaaatgtgagtctatttttacctttaaccacacaccaaaaactttatagatggatcagaaatgaatgccatctcaaatccaaaatcaaatatgtgtacttcagaaggaggaacgtccttctaaacacaaaagtgatagaaagacatagagatttgactacataaaatacaagcctatgaaaatcacaaaaataatgaaatcaaagagtaaatgtcataccagatgaaaatattcataacataggcaagagcccattacttcattgagttatttgtcttttgattaacttgtaagagctctttgtatattcaggaaattagcactttgggtctcgcatgtgtcatctgccatctatccacttctttgtggtattctctgtctctcggaaacttgtaagccctaagcagtttaaatttgtaaatctaatagaaatgaattataagctgacttcattgtatatatatctatgtagtcacctttgatgtcacctgagatctgagctctgccaagaataacataaactgcactatagaactgtttgttgttgttatagtcttagttgagtggattacacagaattttggatctatgttctcctgctgcctttaaaaaaaaagagagagagatctgataactatttttgttggaatttggacagaaagctgccactcttaaagccttatagctctgtctattttcaacccatgccttcatttctttgcctgaaaaatgaaccaagtcaccaactttcactgaatgttttcagaggcagaccccgaaaggttattgcatctgtgagtgaccgcctccctgtggactggaaggcattgaaggttttgtgatgtcattctccctatctttcgatgtcttctccatccatgtaggctagatatcaatatcccccgtcccttgattggtttccattctgttctttcacagctgagcatggggaatttccaaacgagaactagagcaggtaggcatggcagccaacgttcctgatgtcattagttgtctctaaatctccgtgaagtttttattagcttctggtaaccaagaaaaaaaaagaaacagcaaatcatttgttaaagtcatgaagctgaactaaatggataaggtcctctaattgacctcgaggaagctcagggacactgtagatcagtggttaaatgacttgtatgtctagatttagagaagatgtctggctgccgagcaaatttgtctgcccataaattttttgattaggctgaaggcttctgccaacatagccagatattcaattcagtatgtccttcatttgagctaatatcgtgactgaaagcacagcaatctgagagacatagttatttaaatttaaaattgtgctcacagcttgtttctaagagatcaatttattagtccaggtgggagatagaaatcctcaaggttgtagctatgatgctattggaagcgtattaattggaaccatgggctgaaggcaggagctctctgactttacactgcctgccaaggatgccttattttaagtacgtcagtattccttgcaggaaaatactgttacatatttatttttgatagcctagttcaggctccacaagacatcactgaaatgcccaaagtaaattcttagtgtaaatcactggtgttaaagataaaccacgagcttcttgccgcatctccatgacatccaaataagggttcaggtgcctgtcgaaggggacagcttccacgaagctgcgtggaacctgggattatttaacaactttccaactcttcacccattacaagtagagatacatggacaacacactcccttttaaattgatgtatttttctctctttctaaaaagaattcctattgccgggcatggtggctcatgcttgtaatcctaacactttgggatgccgaggcgggtggatcgcctgaggtcaccagttcgagaccagactggtcaacatggtgaaactccgtttctactaaaaatacaaaaattagctggggtggtggcacatgcctgcaatcccaactacccgggaggctgaggcaggagaatcacttgaacccagtaggcggaggctgcagtgagccgatactggcaccactgcactccagcctgggcaacagagcgagaaagcaagactccatcacaaaaacaaaaacaaaagcaaaaaacaaaacaaaaaaacttctattattttctatcaagaaaaataatcttgtataagaagtataaaaatctggattagaaatgctataaaacaaacaacaacaacaacaacaagaagcaaaagacaaccaaaataactaaaaatttttgattttctagatctttcttttcccaagcaggtaacctattttcttctgagtaggcagtttcctgctatcaaacataagtcaagagctctcccaatcagcaagtgtcagaatgaaaataaataggtataacctctttcattagagacttttttgggagtcttttcatgggcaacttttggtttggtttgtcgctttaccaagagctaagatctagataagcaagtattcttcgtgtttctctgtctgggcgttttttctcgttcaggaatggcactcttcagggatccggctttgtgtactagctctggtctaacattctatcttgtgtggtgctgggcttaacctttgccaccaggggcatagcctcttaaaacccaaggtcaagcccaccatggatgacaaatgcctgtggaacaaacaacaactttggtcttctcttctgtcatttgggggatttgatggcttccttttcttttgccatacaagctattatataagagggatttcattatataaaagaagtttctccagataccttggctgccatatgcccacctatgatttcctactaatggcttctgtctttttttgttgttgttcctactgtagtctctctctctctctttctctctctttccctcagcctttccaatccaatgctcctataaccaattcctgtgttaaatcctctctgtttgaaatacttgatttctcttttcctgactggacatgatccctctgtgtctctggcacagacaccatccctgagtctgacttagctcctcagccctgaccttccatcttcctactcagctaagagagagctaatgaaaagaaagaaaagctatcataggaaatcttatgtgggcaatatagcagctgagaaactgccggtgcaaagggggttgtgggaaagaaaatacaaagcttaaatgaacctaagtaaattgtacacatcaatcaatgcaattgcataaattagtgtacagaaaagaaaaggagtttgggagtcagcattggattcaaattttctctgccacttgcaggtagggttatcttaagcaagatattttccttatgtttaacgagttgaattgtgtctcccaaaagacacgttgaagacctaatccccagtatctcagaatgtggccttatttggaaacggggtcattgagatattaattaagtagataaagtcttactagggtagggtggatccttaattcaacatgactggtgttcttatgaggagacacagatacctcataagagagaagaatgccacggtggcagaggcagagatggaactgacgcagctgcaaaccaaaaagtgtcgagggtcaacaacaaccaccgggagccaggaagaggcaaggaaaggttccatctagagtcggtgagagcatggccctgctggcaccttgctttctggcttccaacctccagaactatgacagatacgtttctgttgttttaagccatccagtttgtggtgctttgctgtgtcagccctaggaaactagtgcattatctgagtctcagtttcctcatctataaaggtgggagagtgatactttacagtaatgttccccaacctttttggcaccagggactagtttcgtggagacaatttttccacggacaggggccgggggggatggtttcaggatgattcaagtgcattgcatttactgtgcactttatattatgattacatggtaatatataatggaataattatacaattcatgataattgtagaaccaatgggagccccgagcttgttttcctgcaactagacagacccatccaggggtgatggagacagcaacaggtcatcaagcattggattctcctaaggagccgcaacctagatccctcccatgtgcagttcacaatagggttcgcggtcctatgagaatctaatgcctccgctgatctgacaggaggcggagcgcaggtggtcatgtgagcgatggggggcagctgtaaatgcagaggaagttttgtttgcccgcctgctgctcacctcctgccgcatggcccggttcctcacaggcctaggtactatctgtggcctcttaggaactgggccacacagggtttcacaggttgtgaaagggtttgccacattctttccaagatttaaataaggacatgtgtgccgagcatgtcctcatgtgtcctcaatacatggtcactgttggtgatgttctgcaattttgagggggctggctctccacaggacgccactcctgtcaacagtgcttgcctccctacacatgcaaacacacactacacaccacaccacacacaccacacacactcacacaatacctaccatgcgcagaaatacacactacacaccacaccacactcacacacaccacacccactctacacaccacacacacacacccactcacattacacaccacacacacacaccacaccacacacanctgcgcccactcacacaatacatactatgcacagaaatacacacactacataccacaccacactcacacacaccagacccactcacaccacacaccacacacacaccacaccacacacaccacacccactcacacaatacataccatgcacagaagtacacatgctacacaccacatccactcacacacacactacacacaccacacacactacatgccatgccacactcacacacactacacacaccacacaccacacccactcacacactacataccacaccacactcacacacaccacacccattcacacacactacacacaccacacacactacacccactcacatactacataccacacccacaaatacactacacacaccagactcacacaccacactcacaaatgcacacactacacaccacaccacgctctcacacacaccacgcacaccacacacacaacatccactcacacactacataccacacacaaatacacacactacacacaccacacacaccacactcattctacacaccacaccacactcatacactacacaccgtacacacaccacactcacacagatgacaccacactcacatcataccacactcacacacactacaaaccatgccacacacaccataccatacaccacacacacacacaaatacaaacacaacatgctccatacacacaaatacacaaacacaccataccacatgcacacacaccccacacaaaccacactatgcaccacaccacatagaccacaccagacacgcacaaatacaccacaccacacacaaaccacacaaagacacaaagacacaccacatacacaccacataaatcacacacataacatacaacacacaacacatcatgcatatcacactaccataaacacacacacacacacacaccagtagcctctgctctgtgtgtagccctgcatgtgtggcagcaaactctgatgtgcttttgtccgtttcaagacttccaggatgttcatttcagccaggcctggcctgtgtagaggtctggccagaggggaaggggtccgaatccagccgtggccctggacagcgacctctggagagcacccactcctagctgggccctgcccagctgaaactactccctgtggcattcacccctgtggccttaactcaaaagcacaaggagttgccagttactaaaaagttgaaagcaaaatgcatttgtttcacatttgccaaggtgtttgccaatgatagattaaaatggccataccttctcgtcctttaatgtgctctacttaaaaaaaaaaaaaatcagttgctggtgacaacccaacctcagatggagggagacagagcaggcttggtttggtttggtttggttgagtttgaatccacgtggngaagcccagggagagggtagcccgtagccccagttcctccccaggcacaggcagcctgtgtgtcattctcactagcacttaggaacacttgaaaataattttcaaaggaagtaggtaactctccaaaatgtccagggtgcaaatgagaaacagtcttgcggcctcgcacacatgtgccgggagagcccatggctaaagagagaacacgcatgtgcctgtctttgacgttgcctggtttctggctaccagctgctcagagcttaaattggagctgtcacagaccaaagatgctgcctgcaaataatatatgtgcttgggactcctcagcagcgccagcttctcctcccctccctgtggctgaacaaatctgcgctcctgaagaaaagcagaactctggaattgacccgctccctatctgagtcatcttacctttaagccatagttggacggagcttcagagcctcagagccattaacagtgcacctctcccacaaacacacgcctgcctgaagagcagccggcccggggaactctaaacagcaattaggcaaaatctgaaattacagagttctcactccacagagaaatgcaaatgataattttgcctcctccaaaggcccacagcctgattttgtcctccatctgcaaaatccttccttccaccctccaaagaacttccccaacgaggccttcctggacaagccagaaagggggctcataggtcctcagctcagtctgtgtaatctgcctgctgaaatcctggaaagagggatggaagggagaaagagaaggaagagagggagagggagggggaaggagggggaaagaggtagaggttagaagagagacagggatcaaggaagggaggcagggagaaagaaagagaatttcttttacatcgtttttacccaccccaaacattagttggacactaactatgtcctaagcactgtcgcagataaagcaaagtataagatgtataaccccttggctgagtgcaatggctcacgcctgtaatcccaacactttgggaggccaaggtaggaggatcccttgaggccaagatttggagaccagcctgcgtaacatagtgagacccctcccgcatctctacagaatatatatatattagccaggtgtgatagtgctcgctgtagtcccagctacctgggaggctgaggcaggaggactgcttaagcccaggagttcaaggttgcggtgagctgtgatcatgccattgcactccagcctgggtgacagagtgagaccctgtctctaaaataaatagataagatgtaacctttaggctcaagtcatttccaatctagtcaggagaaaaaaaaaaagccaaacacaacaatttactcaagcacttaatttgatgccacaggtcactatggctgtgcaaatgccgggaagagagagacagctgagagctggaggaggagatgcttcgtggaggagctggaagctgaggcagaccccgatagagaagtcgaatctgaaccagaggagtcgggtgagaagaaccggtccaggagagggaagacaagccaagtcccggggtgagcccctgtggaagaagcctccacacttctctgatcaaccctgcggctcccttaacaccaccaggattccctttgtgcctccttgtgcttgggtgcccaggggtccccgagttcctggagggcaggggccgtctttcctgctttgcacgcccagcccagagtacagtgcctgggacacatggccacaaacgtaaattgtggattgaacagatgagtgaacaagaataacatgaactgcaaagtaggtgcctggctggaaatctaccagcccatccttggggggctttaattcactatcatctcctgtgttcttaagaaccatccaatgggctctcagtataggttggtaatgaagtggagtccaggagatgtcagcttagaggccatccccactccgtacctctggtgatgctgtgagattctctgcctccgttgaggttgttgagctctcacctctcccggccctgttgcagttgtcccgaaagattttgctccagaaccagtgagctctccgcctggccagatacggggtttcttcccttcctctgactcctcttatcccttcagtatcataactgcagccactgagccctgaaggtgaccccgtaggactggctgcccctcgttgccctgggtgaaagtcttggctgagcctccccttctccttggtctccaccctgggacagcccaccgaaggcctgctcagttccgggtcccgaccttgaccacatttctaattttccggatcacaagggtttcctggctctggcctgggctggaccggatgctttggctgtctcagcaccaggtctgacacaagaggttccttgggaggcggatctgagctgggactgaagcagcaggaaccctgggtaacaggaggctggagggtgaggtgcagaggtagggagaaaaggccatggggtatcagaagctgatcggaatttgtggtatgcagggcctgctgggggcagtggggaaggggtcaaccttgggagggccttgagcaaggcatggcattaagaatttaccctgtgggtagaagagggccattaatgagttttaagcagaggggacaaatggccagatttgtgttttaaaaagataacccctagctttgatattttttgctataaagggttgcctaggttaatgaatcactttttaaatgtcctatctcatatgtactcatccatcaatacccatctctcattcattatccagacacccagggcactcagatttatgaggatgtgggagatagtcaagtgtacaatggggtgggggaggcagaattctaaacagggagcgcgtgaggttccttggacctgagctattctctctctctccattcccagggtaaaacccgttttgccacaagtcgttcggatttttaaaatctctatttcataacacaccagaactaagttgctgtttactcgttccaacaggacatggtgtgtatacatcattcgattaagttattactgggtaaatcaagagcatctgtgtgggggagaaaggctgagatcctgactcagtgatttgcagcagcgcctaataatatctccacttgcgcatcttcacagagccaagaggctgtccaccaactgtttcctcgctttagccctgtgaccaccaaggcataggctccagggacagactgcctggattgggctccagcctggctgtttacatgttgtgcaaccttgggtaaaatatttaacctnctnctgtgncctcagaagcctcatttataagacaggcattataacagaatctatatcataggggtgttataaggactgaaggaatcaatacatgcacagtgcttagaacaatgcctggctcacagggagcacacagtagatgttatctattcttattcttatccccttagctaccaaaacaggactagaattggacttaaatttgtcagtttcccatagactcaacattgaatcttggccccttccacgtccaaggaacaggcccttgcttgggttccatcatcggtgaaggtcccatttgtacatctttccagtttgattctagaatgcctgtaggcctgatcaattccttagactttgctcgtccctatctagttagtaattaacatattaggtttgggtgcctaatatgttaattaggtaggattgggtgcctgacagtgaatgactctaagtaattgtgtgatgtgaattacaccaggggcatttgtattcccagtttccagaatattctaggcactcaataatacttggtggatgaatacgtaatgttaagggcaacaacagaaagtaccatctgggctggggcatggtggctcatgcctgtaatctcagtacgttgggaggacaaggcaggaggattgcttgagcccaggaattcaagaccagcctgggcaacatagtgaggctcatctctatttaaaaagaaagaaagaaaggaaggagggaagaaaggaagaaagaaagaaagaaagaaagaaagaaagaaagaaagaaagaaagaaagaaagaaagaaagaaagaaagaaagaaggaaagaaagaaaggaaggaaggaagtaaggaaggaaggaaggaaggaaagaaaggaagaaaaagaaagaaagaacaatctgggctactgtagggttattattccatcatgtacatcacacattaagagtcagccttctactatgcgtagttataaaataatctcacttaatttactaagtgccaatcttaaatcatactgtaaagccgtacacagtcctaaaatcacaccaattaattctagtcaactgatcagacactctgctacttgttaaacttcaaaatgtagtgtttactgattcagattaaccatgatttttttaaaaaaactaaatctacagacttacaaaattggcaaattagaggttatatgatctacaaaagcatttttcaactttaaagaaaaagatccttaggaagtatctgtaaatttcaagttccctatagatgttaaaagtaccattcaatatactaaaatgcatgttccatgaatacacctattttacaaacattaataaatcgagctataagatattgccatttaagtccaagaacaaatgtaggtgttaatattgagtacgtagaacaagtaaaagacaaaaataaataaatgtattagagataaaaagatgggattttaaaaagaaggcagaaaaaagaagcatgtcaaaggagaactcaagcccaaagtaatcaaggcttgtggtttatcctaaaggccacaaaaacagtttattattttcatccctagcttagaaggacaaagacatgctagaccccgcgagggtagacagcacaatcgtagcaggtagcaaagagaaagaagcttcttaactctggctgtcagggaacaggtccagtggccactctggaagcacctcagccacactgggtgaagccgatgccacaggatttggacttaaaactcagctgccactgctcatgaccacaccagctgattgtcctgacctccattttgggggttttcttctggatcttcactggtaaatgactcaacctatgattcaatctttgtctttcattcttcaacctgacgtttgggccactccaagacccaggatctcatgtccctgaaatctcctggtcaacatggacctttattagtcttcaactctctggctcagttcttgattctttccccttattttctgctttgatagagctaatagattggaagaacacagacatacacactatgcctatagcatatcacgattacagcagaacacttgataaagcctctcatttaaatcccagtggaacagactggaaacttgcatgctgcatggtaacataattagatcactgtttcccgagtgtgttttatgggactccataagaagatatcctcacatacagacacatatatacaaagtagtccgcattcttaacaagtccctgggagcaataacacaaagtagtccgcattcttaacaagtccctgggagcaacaataataaagaccctgagagcttttttatttattcatttatttatttatttatttattttatttcttttttttttgagacagagtctcgctcttttaccaggctgaagtgcagtggcgcgatctccgctcactgcaacctccgcctcccaggttcaggtgattctcctgcctcagcctcctgcgtagctgggattacaggtgtgcgccactacacccagctaatttttgtatttttagtagagatggggtttcaccatgttggccatggtggtctcaatctcttgacctcatgatctgcccgccttggcctcccaaagtgctgagattacgggcatgagccagcacacccggccaagagcttttttaaaagtaagtcttatcaatatttagaggagcagttcctctatcagacacattctgagatagcctgaatttgggacgattcatagatggtttaataactgtactcagagactactgctcagtgtccatttgtagagacattgctagttctgtctagatcaaaaggctttgcacttgccctaatcagctcaatatttttttcccatcaatgactttgaattagacatagaatctatgtcttttaattggtggtaggaagacagttagtataatgaaaggcagggtcaaaatcaaaataatctgaataaagactactcattgtgccttttttatttgactcgtataccatcctgcatttgtgttttaaaaattaattgcacaaaaatataacaggagagagttgatctggcgatggttcacgaatagcctgcaagcacagcccgagccaatgaagtgatgctaatgcaattcaaagccgcaggcctagaagcttattgtccagaccacgtctggagtatatatcaaatcctggctactgcattttaaaacagccattatgtgcagaaggggttggacagagtgaaagccaccatcataggaaaactgtctgaaggcattaaatacgcttgagttagaataagagaaaactctaggaagactgtgtgttgatttatcttcaatatgcaaaagacaatcatgtggatactgagtaagacttgatctatgtgctcaaagtctagatggcaggccaaagggtataagtcaagtttcccttcaatataatgactttttcttatgtcatatggtccaataatggggataggttgtcctcataagtagtatgctccccatcatggaagatgttcaaacagatgctgaatgcccaagtgttggggctgttgaagaagggatgacatcaagcattctccctggttgtttaaatatttaactgctgtgtagccaccttatttgggaggatggtcatagattacctagcctgtcctctcaaccttctgcagaatcttctcccatgcctaactctctatgacatttctgcttttagtcctcagtaccatctgaaagtgagggagcatcaggagctgcagctgtggaggcctctgagctgctccagtgcctgggattgtgtccaactcatgctttaacattgcaaaacaccttgatagctttgcaacaaattcctctctatgttcaaactgacctgactcagttcttactactgacaaactaaagaactgtaactgcaacccccatctcgtgccttttaaatatcatctcaccagaagatagttcaagttcatttaagaagggatttgggtcatcattttataatattcttatttcccgtccttataccctgagtgccgaagtccacgtacattaaagcaatcggagagattccaattagcctcatagtcactcatgctcaagtgtagagtatctggaagaaccaaaaaaaggctgctggaacagagttatttacattttaattaaaaaaaaatacgcatctggtgatgcacatttgactcataagggaacacttacgcaagtaccagttttcctctgaaatgtctcactagtggtgtgagttttatacgatagtttctggcctggaaccaagaaaatggcacagcctctaaaagttcatttgttacacagctggcctgacagttaattaatgggctttattaggctggaggtcgggaggcctccctaagccaagtttaggacccagttaggtatcaagggtctggagccccagacgaagctgaaacatcatgctgttaactccccaaactcttggcaacgcacagctttccttttagaaggtaatggtttcatgtctcctgtgaacaagtcctgttaaagatcaaagcaatctttcgtaatctcattttgatgagttaaagggaaatgaaccagaaacatgaaaattaaatgtcccttaaaactccttttgggatgtaaatactaagaagaatgcccccctacccccgccaaaccctatatgggattttatcagaccccacccacgtaggggaaacagagcaaggcttctgacaaattgagacgcatctgggtttgcctctacctaattggtctgtatcatgatcctgaaaagggtcttgtcatggaaagggcacccgtgctgtcctggcaggtgggggtgagggcaaggactgtgctgtgctgcttccatccacagggcatcatctcttcaaagggaccaattgtaaccatcaaaaatgtaggctgctacttcagctttaaaacactcactacataaatgatgtctcacggggctccaggcttataagtaaaaatgattttgtttatgtgttaatttctcactaaaaacacagctctctcaaaggagtttctatagcacatatgccatcaaagacaaatgctcattcaatctgtctcttaaatgtgcaatgactatctctgcatgtaagaacgtagagggtttcatctgtttttattgaagtgaaattcacttaacataaaattgttgggcacggtggctcacatctgtaatcccagcactttgggaggctgaggcgtgtggatcacttgaggtcaggagtttgagaccagcctgaccaacatggtaaaatgctgcctctattaaaaatacaaaattagctggttatggtggcacatgtttgtaatcctagctagttggcaggctgaggcaggagaatcacttgaaccagggaggtggaggttgtagtgagctgagattgtgccattgcactccagcctggacaataagaacaaaactctgtctcaaaaaacaacaacaacaacaacaacaataaacataaaactaactattctaaagtgaacaattccgtgacattttatatgttcacaatattgtgcaaccaccgcctctgcctatttgcaaatcatttccatcaccttaaaaaatagccccgtacctatcaagcagttgttcctcaatctttcctctccccagcccctggcaactactaacctgctctctgtctccatggattcacctcttctggacatatcatataaatggaatcccagccaggcgtggtggctcatgcctgtaatcccagcactttgggaggctgaggtgggcagatgacctgaggtcaggagtttgagaccagcctggccaacatggtgaaaccccatctccactaaaaatacaaaaattagccaggcatggtggcacacccctgtaatcacagctactcaggaggctgaggaaggagaatcgcttgaacctgggaggtggaggttgcactgagccgagatcgtgccactgcacaccagcctgggtgacagagcaagactctgtcttaaaataaataaataaataaataaataaatggaatcctatagtatgtgacctttgtgcatggcttccttcacttagcattatgtttttgaggtttatccgtattgtaacatgaatcagtacttcattcctttttatagcttaataatattctgttatatgtctatgccacaatttgtttatccattcatctattgatggacatctgggctgtttctgccttttggctattgtgaatagtgcagctataaacatgtgggtacatggatttgtttggtcaccagttttcaattctttttttttttttaagaaatgggatcttgctatgttgcccaggctggagtgcaggggctattcacaggagcaatcatcattgcctactcagcctcaaactcctggcttaagtgatcctcctgccccagtcttctgcacaactgggactacaagcacaggctacacgctcctggctgttttcaattcctttggatatatacctaggagtggaattgctagagggccatttgatgatagaaagagctatagctatactctgcatgcctgtttttccccaacaccataacacacacataggaagttaaataacaatccccacagctgtgaacccattaccagtttcattgagtagacattgaaactgctgcctggcatttcaatgtcctcaggtcatggaggggataagcaagaagggaggccccagtgatttctggagagactggcactatcaagggcgctgggagagctacacagtgggagccggagcagtattcatggatgcccaggggtaccccttaggatgtctgtactgcctgcttcatggtcaaggttaacaaagcactacacatcaaccccacatgggcagcatcaccaaggactcaaactcctcaggactgaaaacgtaggtctctttctcaagcaaagaatttcaaccaactgagatgctggaaaaagacaaggaaagtttggaatagaatggacagttggccaatcagtcttattcctgctaccagctgcagcagagcagactgatatcttcagcagtatttctctgcatgctgcttatgtgtaagaatttcctcccttttctagtataaatagaagttacaattttttcaaatgaaaaatctgacttctgagtggatcacgtacagaaaccttcctcttttcttcaaacatggataaatatattcatttattcactgatgaacaaatatttattatttgataaatatggttcactgtgctgagggaatgacagggaacaaaacaggcaaagtccttgccctcatagacactgccttctggaagagggagggagacagaacacagtaagttgatcatatatcaggtaatgataagagctaagcagaacaatgaaagagattgaggagacagagctttaagagagggtggtcaggcggggatgtgcactcatttgtctgagaaacagcatggaacctgtaagactgagtagagtgtgtaacagggagggtggtaggaaatgcgattagagaagtagtgatggcctgtctcatgcagggcctgtggctgtagtaagaattccataaaactagtaaaacctggatgccaaaaccaaacaaggggaagataagaaaggaaaatcacaagccaatctcaatcacagacattatcaaagtcttaacataatattagcaaacgaaatccagagatctatttttaaaaaatcatttaggatttatccctagaatgcaaggatggttcaggatgaaaagataatcaaatgatatttaccactttaaaagattaagaaagaagatcatatgattgtttcaatagttacagataaagcatttgataaattcaacactaactcatgatttaaaaaaaaaaaacaacatagtaaactaggattagaagtgaataaacttccttaacctgagaaagtatgtacaaaaaacatccttacagaagaattgttggaagcatgccctataaaatcaagaacgggacaaagatgttcactctcagtacttccattcaacattttcctggaggctagtaagacaagagaagacataaagattgatgcactgaatggatgtgtctgtgtctgtatcagcttggcatcatcaccacttcctcctacagtcttctctgaattgtgtaaggtagaagcctgaaactgcatttcccagcatccccttctctgtattactctgtgttaaagtttgcagtcccatgaaatctgattggtaggggaagagttgaggctatcagtctccaaataaggatgtaaccaggtgttggggcagacctgatatgcccagtgaatacttgagaaccacctgcttcattgctgcatgcttagacagctgatggacgcttctcaaagattcttaggattgcagctgtttcctgttaagaaccaccaatttggtgcattgcagtaatctaattgtacatccagtttggcatacaataaggacaaaaagaatagaacaaaatttttaaatattggttttgttcttgtgaaactattatatgtattttgtagaatgaaacaaatatgtaattatgctaatgtcattagaaaccagattttcaatgtgagagaaaaagagatccaaatacaaaccaaagaataaaaccctgtgatcttaaatttaaaatggaaatttgagtatcctatgatgatttttctctttaaaaattaattttttaggaaacataaatgaaaaaatacctagaagtgaagtcacctggaaatagaatgatcaacccagtatcacggagtacccttaaatatccatcagggaaatgcaaatcaaaccacaacgaaatatcatttcacagccactaagatgattatagtaaaaaagacaaatatagcaagcattggtgaggatgttgaaaaattagaaccctcttacactgacatggtacagtcattcggaaacagtcttcagttcctcaaaagcttaaacataaagttaccaaatgacctagcaattctactcctcatatatactcacgccaaatgaatcacatgtccacaaaaacttgcacacaaatgttcatagcagcattatttataatagcccaaactggaaactacccaagtatgcatcaactgataactgagtaagtaaagttgattgtgatgataggttgtacaactgtattagtccgttttcacactgctgataaagacatacctgagatggggtaacttatttaaaaaaagaggtttaattgactcaaaattcaacatagctggggggacctcacaatcatggcggaaggtaaggaggagcaaagccatatcttacatggtggcaggcaaacagaatgaaagccaagcgaaaagatggttataaaccatctgatctcatgaaacttattcactaccacaagaacagtatggggaaaactgcccctatgattcagttatctcctactgggtccctcccacaatacgtgagaattatgggagctacaattcaagatgagatatgagtagggacagccaaaccatatcaacaactctgtgaatatattagaagccattgagttatacactttaaatggatgagttgtatagggtgtgaaatatatctcaatgaagctgttaaaaataatacagtattttaaaactgattattaatgaaagcacagaaaaataccaagacttagggtacagcaatagttaagggaaatatttatagcactacaaatatttttagaaccataagaaagatgaaataaatgaactcatgtcaattcaagaagatagaaaaagaacaacgagtttaggcaaaaaaaatgtgatggaaagaaatattaaagataaaaacaaaaaaataagaaaaggaaacaaaagtaaaatagaaatgacagaatgagtcttagaaaagaaaaataatgctaataaaataaatccccattaaggctgataaataaagaaaaatgaacaaataaacattaggaatagaaaatataatgtaaccacatatgcagcagaaacaaaatcataagggaatctgtggcacaattttatgtctattctgaaattggctgaattttaaaatagaaaaactgaataaaacaattagcattaaagaaattgatttgacaatcaaatatacctgccctcaagccacctccccaaaaagacactagtcttagctgatttcagcagtgaatttcatcaaacctttaaggaaaaggtcattgctatcttatataagcttcccagacaacagaaaaggacagtaggccactgagtttagatagtgtagaattaacaccaaaatgaaacaaggacagtacaagagacagaaactataggttatctcacttataatgtagattaaaattcctgaataaatattagcaaatggaatccaaccagagtattttttttttaacgatcacaactaattttgatgtttcccaggaaggtaagaatgtcagaaatatccatcaggagaactttacaacatttatagatcaaaaagaaataaaatgacacattttattctataaattcaacaccttctcttatctaaaagaaaaactcttaggaagctagaaatggaagagaacttccttaatttgatgaagggtttttatcaaaaacctaaagcaatcatatcacatctttctggattatccctattaaaaccaagaaaaggcaagcagggcagccatcaccaccccagtcaactttacacagaaaatactagcgaatgcagtaagcaacaaataaataaaatgcataaggtttggaaaggaagtgaaaatttattatttttaggcatagaaaatgcatagatgggtggcgcacggagacttatgactgtaatcccagcattttgagagggcgaggcaggtggatcacctgaggtcgggagtttgagaccagcctgaccaacatggtgaaaccccatctctactaaaaatacaaaaaaattagccaggtgtggtggcacgtgtctgtaaccccagctactcaggaggctgaggcaggagaatcacttgaactgggaggcagaggttgcagtgagccaagatcgaaccattgcactccagcctgagcaacaagagcaaaactctgtctcaaaaaaataaataaataaaataaaataagaaagaaagaacaaagaaaatgcatagatatcaacagaaaatcttttagaactaaaaaaggattcagcaaggctactgattacaagatcaacatgcaaaattcaataacttttgaatgtgaacaataacaaatgggaaaaaattggaaaaaaaaaaagccagctcacaatagcagcaaaactataaaggacctaaagaatatacattacgtaccatttttaagagctttatgggaaaaaattatagttttattaaaggatataaaagaagatctgaataatgggtaagaggtctcaaaagcataaacatgtcaattctgcccaaattatctataaatttaagtaaattccaaataaaatctcagcagaacttttctgttcatttgtaacgtgattctaaaattcatatggaaaagtgaattatcattgccaagataatttcgaaaaataagaacaatgggtgggcaggagcagttggcctgcggattctgaaacattctagacagtcacagaaattaaaatatagttgtctgagcagaggaagaggcagcggacagaatagagagcctggtgcaaatccatgttcatgcaggattcacatgtaggggctacgtgggatgtggaatatgatagcggtggcactagagatcagcagggaaagatgagcttgtgccatcattgatgatggaagcattggcttttcatataaaagactcctacactaattatacaaaaattaattccagaagaattaaagacctcagcacgaaaaatcgcaactaaacactactgagacgtgagacctcaaccacatcttgaatgcaaaatttcatcgaatgtgaatatcataattctatgtatggaaaatttttaaataagacaaagcataactgtatgttgttcatgaagatattttttagtttagtttcttttatttttatttttttatttttaagtttgaagaatatctttatggcccaaagtgaatctgccaagctttttaggccaccttgcgtgcattttagttgtttccccaagggagaatctgaatcggtgccttccctgactctttcccagccaaaatgcgggcacgtgaccaggcctgccaatcagacacgggggcctcgggccgcgggagggagctggctggctgcgcgtctccgggagccgctgtcatttcagtggcgcattctgggcaaaggcggtgtggtcccggggtgggcagcagattccggaaagggtcagttggttctgggagtgtccctttcattgtctcaggcctcttttcccatctgtcccaaacgttgtgtgaactcccttctgtctctcctaagttcttttctgcttaaactggtcagaccggattctactgcttacaaatgacaactgtaactgacacgcaaccctgcagaacagaaaacatctttataacaaaacataccccatcaacgttagagaggaaaaaacaggcctcgagaaggtatttgcaggatctataacaaaggaattaataaagatatatactgtatttatcttatcagagaatttatctttaatggagaaaactcggataaataaagaacagaagcacgcccataggaaagtggagggaaggagaacaggaagtcctcagaagcagaaatccaaaggtctttattatatatatttgttcttatttttacaatttacataagtaaaattatggcattcatattccatacattccttcacacaagataagcgtacgtgagacctcaaccacatcttcagtgcaaaacttcatggaatgtgaatatcataattctacttatgtaaacattttaaataagaaaaagtataactgtatgttgtttatgaagtttttttttttttttttttttttttttttttttttgagacggagtctcgctctgtcgcccaggctggaatgcagtggcgcgatctccgctcactgcaagctccgcctcccgggttcacgccattctcctgcctcagcctcccgagtagctgggactacaggcgcccgccaccacgcccggctaattttttgtatttttagtagagacggggtttcaccatgttagccaggatggtctcgatctcctgacctcgtgatccgcccacctcggcctcccaaagtgctgggattacaggtgtgagccaccgcgcccggcccctgaagatgtttttaaactattttttaaagtttgaagctggaagcacgcactgctaaatatgatagtgctgcctttccagcgtagagggctcagcagccaagcatcacaatcaaaaggcttccgagatttagttgtatttatttctgggggggtggagagataaagtatttacagttattaatggtttaatatggattctttcactccatttcctacacttacagaagaattacatgagaggaaataatggtatattctatgtgtaaaaatgacagagggaaacttcatcatagagtccggaaaaataagcttttgaaaaaacaagtacatttctgtggctttattctcaactcaatttttaattatgcatgcaatttactcccatgaaataaagataaaagatcataatgagtcatttataataattttacgtcttaaataaagtaatggagcttttccttctaacatgccatgttcttcacaatgatcctgtacctctgtgtagccatgacaccaagcctccaagatcacaactgtgacacgcacctgtcattcacaggccaagccacaggatgccactgttgcatttttgctataatagacttttacttaaggtgaatgaagaaagaaaaaaaggaaactctatttttaataaacagacacatggcaaccatttaagattcaagatacaacaaaccttaccttagttattagttatggctaattattaaaatccctttaaattggactttgaacatcacatattgaagttgagatttctatgccagccatgtgcaattgctacatttatagactcatgacatctcttaatatattactgacggccgggcgcggtggctcacgcctgtaantcccagcactttgggaggccgaggcgggtggatcacgaggtcaggagatcgagaccatcctggctaacaaggtgaaaccccgtctctactaaaaatacaaaaaattagccgggtgcggtggcgggcgcctgtagtcccagctactcgggaggctgaggcaggagaatggcgtgaacccaggaagcggagcttgcagtgagccgagattgcgccattgcagtccgcagtccggcctgggcaacagagcgagactccgtctcagaagaagggacggggggcagaaaaaaaaaaaatatatatatatatatatatatatatatattactgacttaaaataacatattcactagtatttaagcctctctaaaattgtttgttaatgagtcaatgtatttttgaaatcgaagtgttgggtaaatcaaagtatcgttttccttttacttacccaaagatacttatttgcattctgattgaaccacaactgatagttatacttggcactctccaatttctttttttgtttgtttgtttgtttttgtgatggagtttcactcttgttgcccaggctggagtgcaatggcgctatctcggctcactgcaacctccgcctcctgggttcaagcgattctcctggctcagcttccgaagtaactgggattacaggtgcccgccaccacgcctggctaatttttttttgtatttttagaagagatggggtttcaccagttggccaggctcgtctcgaacctctaacctcaagtgatccgcctgccttggtctcccaaagtgctgggattacaggcggcactttccnagtttctttctgaccctgtcccatactttctagcaagtaagtaaaggtttacaaattaacaattacaggtccccaaaaagcttctatttaaaggagaacattacttttgtcctgtgagtaaataaaatgtataggaagatgttcccaaaatataaaatatttctattaaaaagtgaccatatttatgaatgcctggtctatgtatacaggaaataaataaattgtagtctctcaaagagactgcagcctaattaagcacatccctttcctctgccaactcagtcagtttctgtcttctgtggattttcatagctctttgaatatgtgtttagttataacctgcagaaattgttcatttgtttattcatttccctattcaacaaatactaggtgcagagagcaagaccaacatgacctgtcctaggaggttacggtctaataaatgcattgcaattactgcttactcatctttctcttctacaggactgtgagctattcagtatccccagaatgccgggcagagcagactgcaaagaaatattgctttggtgaatgatgtgccgggatgaggtggaggcaggaaggccagaaatgagcacagtcatccagccaaacggtgctgggagctcaggacggagtggcagagtggtgttgggaaagaagggacatttaaacaagatggaagagcaagaggacttgatgctcctgcaagcagtccaggaaaggttagattgtgtgtttattttcctcactaaacccacaagatttatatgttgaaattctaacccctaaggcaataggaagtggggccttttgcaggtgattatgtcagatggaattagtgcccttataaaagacaccctagagagctgccttgctccttcaaccacaggaggacacagcaagaaagtgccatctatgaaccagaaagtgggttctcactagacacccagtctgcctggatcttgaacctgccagcctccagaaccatgagaaataaatttctattgtttataagccacccagtctattttgttataacagccggaacagactgacaccttggcactggcaatctttctatgttatagaattaacccagtgccagcctcattattgtgaaataagctggcctattctgcagtagatagtaatccagcaataaaaggcaagcagctgaaaaatcaacatggagcattcctcggcccattccctttggtgcacttagcaaggacatgagcagacgctgtcagtttgagtcacaaggcatgtgtcctggctcttcacgtgcccccgagcacaggtcttagagtttggggcaactcttcgggggtcagtgtgactcacaggcatggagcatgagcaaagtggtgggctgagtggttggaaggtaataaattcttaaacttaactaaaataacccaagtcttaattcaggatattggttgcctaagcaacagagaggttaaagcagcaataaattatggctagtcttatcaaaatagagctcctacaggtttacaacagggccctggcaccctggttgttggctgtcaaacacaattgagtatggagaaatgatcaagtctgtatcaaaggaaaacagaaaaccacgacccaggtacaagatccagaaacactgaggtcctaatctcagacagtttggaaagcagaagacctgcctctgaatctccgccctggccttcactcacagtgcggcctcactgggctgcccaccttatctctgtgaacctcagactgtcctctctaaagagagatgttgtaaggctcccacgaactcacattcatggaaacactcaaaaaacagcgagatgctttgcaaaaaaaggtactgctgtctttaaaagatgaaaaacaatgttagttgagtaagagtaacaataaagctatcatattttaataagaaatacctatcagccagcagttcagatgagtgaaattatctgaacaaagaaaccatgtctataacaacttttaaaaatcattttttgttaacactcatacttgaccttcagagacactggagttctggctaagttaaacatttttgcaaggtcctatgtgaagacttacagtggtatagtcatccttcttagtcttataccaatgtctgattaattttcctagcacaccacaccgcctctgtccaaatgtctgtcactcattcagtgccttgcttaccctgtgttattttgtacattctctctctttcaatctctctctctctctctctctctgcctctgtctctctgtctctctctctctgcctttggtcccacataggagtttccctctccagccagactgatttttctgccccatatgcaatcctcattgtccttttctccttgaagacccaggtcagagcatcagccacccagtgatgtctaccccatgtatgctacgctcaccaaagggagtgttgtgctcttgttaccttgctcttcatgttaccttgctctttgtgttaccttgccctttgtgccttcaagtagacttcaaggtttctgagaaaggaccaggaggggcctcgcttactgctcttcagtccacgctacctgggactcaaccttgtgtaggtgggcaggagttgtctgaagatagggaggagggcaagaagacataaatgactgtgagctcttatacctgggagaggccccacagagcttcacacagtgctgctccccaaacagtcctagaagaagaggccactttctttcatctggaggaacttaggaacatacaagtatagggtatttaccaagtgtggagtgagcactgggctgccagtggggatcctaagtcggatgaagaaggaagctgatgtggctgccttctcttcccttctgcaatcctgacggacatggaggacagagacaggtgtggagaagacccacacctacaggtgtaagctccattgaaagggagacatggcacagaggaatatatgccatccgaatgacatattcagtcagctgaatatatgaagagacatatatttgaatgactgatttcattcttcctcccatcccaatgcaatgagaattcaaagaacaacacatataacctctatgttccaccagcaagtccacacacagcacacgccacatgtggaggggttttagacagaaggaaatgtgacttcttgtccttcctgcattttgccttcgtgaattatgcattcatctctgcctcccaggacaccattgatagaagtcaaatccatattaataatcctcaaggctgaatattctcatttgccaacgttttatttttatacaggtagaataaaaacagtaaaatgcacagatcttaagtgtttagtctaatgagttttgacaattatatgccatgtaaccaccacttcaatcaaaacatagaacatttccatcattctgggaaatttccttctgctccctctcaggtgatcccactctcaccccgcagagcaatctctctgatttacatcaccacggtgaagttttgcctatttttgcatttcatataaaaggaatcatataatttgcattcttttggttctggccttttgagttcagcataatgttcatccacattgttgcatgaatcagtagttttttttattattactgagcagaattccattgtatgaatgtgtcacaatttacctaatctcctattgataaacattagggttatctccaattttgtctattatgaaaagagctgttgttgtggtcatgtacaaatccttatgtgtacatgtgttttcagttatcttgggtaaatatgtagtgtattagtttgttttcatgctgctaataaagacatacctgagactgggtaatttataaaggaaagaggtttaattgactcacagttcagcatggctagagaggtctcaggaaacttacaatcatgggagaaggggaagcaaacacgttcttcttcacatgatggcagcaaggagaagtgccaagcaaaaggggggaagccccttataaaaccatcgatctcgtgagaactcattcactatcacgagaacagcattagggtaacagcctccatgattaaattacctcccaccaggtccctcccccgacacgtggggattatgggaattacaatccaaggtgagatttgggtggggacacagccaaaccatatcacataggaatggaatatctgcatcataagattaaacatatgtttaactttatataaaactgtcaactacagtagtcccccaaaactgttgtatcatttcacattcccaccagcaataaatgagaattccagttgctctggattcttcccaaaatttggtgttgtcagtttggtagggggagggttgttttgtcctgttgtgctccttgctttaagttcttctagtaggtatgacgtggtgactcactgtggtttcgacttgcatgatgattgatggtaagagatgctgagcaccttttcatgtcttattgtcattaatatatcttcttttaagaagcatctgttcaagtcttttgctcattttttaaagttttaaaaattgttttattttttatttgagacagagtctcactctgtcacccaggctgaagtgctgtggtgcaatcatagctcactgcagcctcaaactcctggggtgaagctatcctcccacctttgcctcccaggtatctgggacaacaggcacacgccaccatgcctggctaattttttaatttttactttgtagagacaggatctcaacatattgtccaagctggtgtcaaactcctggactcaagcaaatcctcctgcctcagcttttgcccattttaaaatgggactgttcatctctttattgttgatttgtaaaagtcctatgtattctggagtaaagtcttctgtcaaatatatatgccgcaaatgtttttcccaatctgtccaggcttatctgttgattttcttaccagtatcttttgataagcagaaaaccttaattttaataaagtctaagttatctattttttacttgatggttaacagttttgggattctgttcaagaaatcattgtccaccacaggatcatgaagataaaggcctatattttttccagaagcttatggttctggatcttacatttaaatctataattcagctcaaattaatttttatgcatggaatgatgtggaagttgaagatcactttttcccatatgaatatccaattttttcaacaaaatttgttaaaaagactttcctttccctgttgggctgccttggcatcttggtaagacatcaacgggctatatatggatgggtctatttctagagttactaaccttttatttttaagcaacacattcacctggagagtgggtcctcaagactcctcaacttcagtcttgtctttaaagggactgatagagaacccttgattttttagagaataaagcctatatgtattaaattatagtacttagtacatagtacaaggagcaatattttcaggcaccatacataaacaatatggaagccccacaaacaacatgaatgacacattggtttcattttcttgaattaaaattcactctaactttaagctctcatacctccatgctgataggaaaatcagtctaagattttccttaaatttttccttccttgtggttgcagaagaatcttttgccaggagattgaaaaattgctggggtggggaagggtcagaaggaagagggcacctctgctttctagtccattaagctaacagctgatgtccttaaggatcaaacctaaatattcccttcaaggccgggtgcggtggctcatgcttgtaatcccagcactttgggaggccgaggcagccagaacccttgagcccaggagttcgagaccagcctgggtaaaatggcaaaacctcgtctctccaaaaaaaaaaaaaaaaaaaaaaaaaaatattagccaggcatggtggcacgtgcctgtagtcccagctactcaggaggctgaggtgggaggattgcttgagccagggaggtcaaggctgcagtgagcagtgatcgtgccactgcactccagcctaggcaacagagtgaagtgaggccctatctaaaaattagatagaaataaataaatattcctttcagttggagtgagatagaagtcgaggttcattttttatgggaatccagttgttttaggttctgtgccacatggagtacagggatccctgcacaggctgggagtctccaggggctgacagggagtttccctaggcttccccggcagctatgcccctcagaagctgttaactgctcggatgttatcagtttccatggagtacagcaatggacatctgatgtttttctctgcccaatacagcttcccttcttctggtaacagaccttcactttctctttgggaagccaccttccccatcccagattatgttcccccagatcgaagaaggtgttattctaccccctccgtcctgaaggaaagtgattgtttaagctccagacctaagttaggccaattcgaagcaatgaatgaaagtcaggccctgggattcctctccaagaagttttgtcgttggacttcaattcggtgggctgtagcctccatactgggaatattctatagggacagaatctgatggagaatgaagccagcatgttggtcagcacaggcacaggatggggagaaagggaccaggtccttctgagaaacagaattcagccatgtctgagccaggttcacagtcgcctaagtcattaaattctctttaaccttcagctccctgaagttgggttctgcaagaagagtcctgactaatatttcacaacttgggcagcccaacaccctcagcccttcccaatctagggagagttctcttcctttcctcagaacttctacttccataccttgttcccagcaccagcctgtcaggaagcacagagccaggaagggcactgcctaagattgctcactttttcacctgccatgctgccttcctgcttggaatgggtaaggaaaagtcacggtgagcacaaacacaagatctcagcacaaacacgagatctcaggacaaacacagtatctcagcagaaacacaagatctcagcacaaacacgagatctcagcacaaacacaagatctcagcacaaacacgagatctcaggacaaacacaagatctcaggacaaacacgagatctcagcacaaacacgagatctcaggacaaacacgagatctcaggacaaacacgagatctcagcacaaacacgagatctcagcacaaacacgagatctcagtgcagccagctgccactggaccttctcctctcctgctttcttagaattgatcaatttntctcccatatccatttgctcccctcttctttttttttttttttgagactagttctcgctttgtcgcccaggctggagtgcagtggcacgacctcagctcactgcaacctctgcctctcaggttcaaccaattctcctgcctcagcctctagagtagctgggactacaggtgcacaccaccatgcccggctaatttttgtatttttagtagagatggggtttcacgatgttggctgggctggtctcgaactcctggcgtcaaagtgatccacctgcctcagcctcccaaagcgctgtaattacaggcataagccaccatgcccggcctcgattgctttgtttttaagccaatttaatgcatggatcacttaccttgtgtaagtccagtacgcctggagttataaaacagtctctccccttggaaggctcaggtgtaataaacaagaatttgaaaccaggagagagtgactaagggaatgtggattcagggggaaaaaagcaggaaaaaagtcaacatttctaatttggagaaaccgatgacaccactgagagagcccctcagggaagaagagggggctggagaatccctaaagagaagcttagataacacgggggaatcagatggcaggatctgcaggcataggactctgaaggagacttgagagtccactaaattacagaatgtttttgttaaataatgcctgagggatgatctgatctgacatggatagctccttttatttcttttaagtaaaattaaatccaactgtaagccccaatttcaccattaacaaacgagataacaaagtcaatagttcccacaatatgcttgggttagggactcctgcaacgcccttccgggtctgccacgcagagaaaactcggctcttatctgctttattagttgtaattagtcatataattttttaaaaagcaaacatctaaataagtttggacacccaaggatgagatgatctcgcatttcccttgcagtgctaacattttttccttctcctgagcccaatctactcctccacccgcgtgactttgatttgcaaatcacgtgtgtcacgctccctctctgggttccctacctgttgttggtcaccaggactcagaaaccagatttctgacaaacttggatttgttaaatagagctaagtgctactgagaaaaacaacgcaggacaggccgggggcggtggctcacacccgtaatctcaatactttgggaggcagaggcgggaagatggctcgagcctgggggttccagaccagcctggggaacagagtaagaccctgtctctacaaaaaataaacaaaactagccaggtgtggaagcgtgcgtctatagacccagctacttgggaggctgaggtgggagcccaggaggtcaaggctgcagtgatccatgattgccactgtactccagcctaggcgacagagtgaaacccgtctcaaaaaaaaaaaaaaaaaaaaaaaaaaaaaaaaaaaaaaaaaaaaaaaaaagaaaaaaaaaagaaaaagaaaaaagaaacaaaagaaaagagagaagagaaaagcaggacataggaaggggcctgcagggtgtgggtggtggttttaatgagggtggtctgggagaagcctcagtgagaacgtggtgctgaaacaaagatctggtggaggtaaggatgcaagacgtggggacagcaagagggaagctgtgcagagcgaggccacagcaaggacaaagccccggagggaagagcctggtgctgcagcagaatgggcaagagaaagtggtggaggtggaggtggaggctcggtggagtccaggttatatagatggtgggtctgaaacttggagatgtatcagaatccccgcgattcccctctccagagtttctgattcagtaggtctggggtggggccaagatgtttgcattcctaaggaattcctgggtgctgctgtcgctgctggtccaagcccacgctttgagaactgctgctgtagacagatgcctagaacactcttctcccagatggctgcacgaatctctcacgttgcctttatgttttcattcaaacatgacctgtacaatgagggcttccctggctaccttacccaccacaattccaaacttcctcccctactaaacacactccatcctctgtccctactttttttttttttagacagagtctcactctgtcacccagctggagtgcagcggcatgatcttggctcactgcaacctccgcctctgaggctcaagcgattatcctgtctcagcctcccgagtagctgagatgataggcatgcaccaccacgcccagctaatttttgtatttttagtagagacggggtttcaccatgttggccaggctggtctcgaactcctggcctcaagtgatctgcctgcctcagccttccaaagtgctgggattacaggcgtgagccaccgcacccggccaatcctctgtccctaccttcacagcacttctcacctggatgagattcctggagttgttgtaacaaatgaccacagaccagggagcttaaagccacagaaatttactcacttacagtgctggaggtcagaggtccaaaatcaaggtgctggcagaactggttccttctgaagacttggggagaaagctcccatgccgctctcctaactgctggtggtcccggcactgctgggtgactctgggctcatagttgcgtcactcccatctccacctcctccttcccacggctgccttccctctgtgcctccctgagtcctcacatggccttcttgtcaagatgccagtcattgaatttagtgccttctcaaatccagtgtgacctcatcttgactattcacatctgcaaaaatcctgttttcaaacaaggtcacattctatggttctgggtgggcatgaactgagtggggagtgggggaggggacagtatttaacccagtacttgaccctttatcaggcaatattttgaatagctcttgcttattttctaggccccttcctcatgcaaatgttcttgataagctccatgaagacagggaattgccccccttttgttccgttttaaaatcatcagtgactagaacagtgcctagcacttaacagattctcaatggatagttgttgaatccataaatgtatgtgtaatagaataaatggtatttgggccaggtgcggtggcttatgcctgcaattccagcactttgggaggccgaggcgggcggatcacctgaagtcgggagttcgagactatcctgaccaacatggagaaatcccgtctctactaaaaatacaaaattagcctggtgtggtggcacatgcctgtaatcccagctactccggaggctgaggcaggagaatcacttaaacccgggaggcggaggttgcagtgagccaagatcacaacattgcactccagcctgggcaataagagcaaaattccatctcaaaaaaaaaaaggtatttgaagacaaaacatggcatgagggcatcaggggaatgaatgaagactgggacttcccaggactgagctctagagtgtcccagcgtggagaagtgcgggagatgaggagggagctgcaaaggagaatgagaagggccagcctgggaagggggaggagagccaggacatctgctgttttggaaactcaaagtgttgagagcattggccatgatgtgacgtcaagtggaatgacggctgagaatttaaccacatggaagtcattggtgacattgacaaaagccattttgatgacgttttagaggtgaaagctggtcaaatgcacagaaaatcatctggttggaaacatcaagacgatgagagttgttgtctttgggtggccagaactgctgaagtcattattatcttattattgcttgactgtacctctaaatgtaataaatatgcagctgcttttataaaaataaaataatcttaagccatatataataaaacagaaaaaagtatctggaatttttcagggtttacattatttttctattttactttgaatctgctttgcgttatctgccaatgtgttcatgaaattttagaattaggcaaagttaaagattatgaattaccagttcatatttttaaagtcttttgcataacacaaaacactttttataatttatttcaccaatcccttattgttagacttttgagttattgccaactaaagtcctattgttagacattttggttgcttccgatttgggcctaacaaatcatcagcagaataactggatgaaaccaataattggatgaaacaaaccacccaagccagaataattggatgagaataaattacaaataagggagagagagagaaaaaaggagacacaaaacaactggagaaattctgggaaaacatacaaaaattcttaaagaagtaaaagttttttaaaaaataaatcctttagtgcacaaaatttgtcaatatttgcaaaaaatacagtgattagaggttaactttcaatcaaattacttttatttttagaaattattgattactcaactaagttgttattcacaaaatcatgttcatgttcctccccccgcccttggtccaatgcttatgtggccacttggggagttgtgctaccatactgtgtacgcgttcggtggtataaaccgaaagagtgcttatcttaatatttgcaagattgctttctaaaatccagtccttttctctcaaatctggtagtggcactgatctatggttgacatagttcaccagcaatgcaacaaaagggcattacttcaagttcaacacctgactgggtctcattcccagtcccgagggagtgaattcagcaccttcttctccacgttgatccccacagtggcctgcacagaaagaggacaggaagatgtccgggctccagcatcccaaacgtgtctggtacataacagaaatggagagccactccaaatataatttgttcccgcccactccaaccccatcctgaaaatagtaaaacagctcttcattttttttttttcaaatgcagatgggtcacactaaccagaggtccttgtcaaagcattcaccatattggtcttcactttgatcagcctcaacccgtctgcttccagtcctccgaagcacgatcgatgtttgtttcagacagaactaaaaataagagctagcaggatatttgtcataaagccacattagaattgtcatttccaaggaaagcgaatccactcctggcactaaagttgctcatcttgttctttagcgttgcagcattacattcattcccaggtagtaataaaaccatcttcatctcttccgccagggacaaatgtgagaacccagcccaggtgagcttcttagaacacatgctgtcctataagaaaactgcagccagttttatctctcccttagacagcatattatttttcttttatatacaatgtacactttggctgaaccatttgaaagtgagtttcagacatcatgacccttcactccgaagcacttcagcaaacatccaccaccaccaacgttctcccgttcaaccacaccatgaccacaccaaaggaaatcaacattaattatataatatctaatgtagggtcactgctccaatttccacaagactcttcaaaatgtcttttatagcttaaaaataattttattatacagttgaggtcatatattacctttggtttccatgtctcttttagggtcttttaacatagagtgatccccttgcctttttgatttgcctcgtttttctgttttacattactcagatttttttttcaagtccactccaattatcttgtaccatctcctatgtcctagatttgtctgattattccctgatgattagattccggttaaacattttaagcaagaatgccagatagacagcagggcatcctcatagcatcatattagaaagtgggtgctaaagttaggctgttgagacgctgtgtttggcacttagcagccaacttatttttaaaaaaataaaattagctaggtgtggtagctcactcctataatcctagctactagggagggaaaggcaggagaattgcttgagaccggggttcgaggccgcactgagctatgattatgcccctgcactccagcctgagtgacagagacctcatctctaaaaaataaaaataagaacaagttagaaataaaattaacaaaccacacagtgaacacatttctatttcctaattttctaatagcatgatgaaagcccagtgtatctgtcattaccattttcatgagcagcaatttttgtgatttttaatgcagctctaagccatgagccttctctatcactgtgaaggggatgtttaaaaagcttcctttaaaaccaaccaccaccttgcacacagaaaaaaacagtcttcacaagctaggaatttacaagctgaatcccaaactgagacagatggctgagggcagtgggccaggtggttgcccctgtggcctccgtcctggtctgggaatggtcactggtgcaggcacacatcactcacaggagcggtgtcctccaacccactgcagctcaagtccagccaggagacccagagctgagctgctgcttgtattttggaaaccacataaatcacacataagaattcacaggctgacagcaagtaatgcccgttgagacacgggcaactccagtgggaagagggtgtgtgctgggactgagttctattcacctcaggatccccagcccaggcccctggcactaagcaggggctaagacaggtaggttgtgactctttgatcaccaccatttaccccttgtcctcttgatgtgatttctgggcctggaaatggcccagaaatgtgtgtccccccaagatctatgtccccaagagctttcctgtctgctggagctgccgaaaacctgagttttgtcctggtagttcgagagccctgttacaatacagctgtccccagccatttgccttcatgagcgaggctggagaattgaagtggagtgctcgggcctcgagcagagcctgggtgcatcctgcgaagccactagggctggtttacggggctttagctgactccctgggcacgttgatgtacctgtgccaaacacctgcttattaagcgcctactgtacgccggacactttgtaaccctggtgcccccacatccaccagcaggactccccctgccccttactgtggtccaggctccactgtcctgggaaaagactgcccccctcgcaacttcgcccgcaggatgagtcgcctctgccaccccctccccgggcatccattgcagctggagggcgcgaggtggggaccttgggcactgggccctgtgggcaggaaccagcagggctgatcccgagcatgccatcctcatgggcggcaactcagcactaagaagcttgcagagtcctggagctgctccaagaaggagcacagagaacggggccagactctggggtccctgggggctgacgcaagatcttgcaatagggtagggggcagagttggggaacctcctgagctttcctgggtacaggctgagggaggttgaaggtggacctctgggggccgtgggagccaggaggctgcttggaaagaaggaaggtggcaggttaagatgctgtggggtgggcgggcaccttgagttaatttcctaaccttggtccccttttgcgtggatccattgtgctcttggttgttttttctttgtttgtttttgtttttttgtttgattgtttgacaggctctcactctgccacccaggctggagtgcaatggcacgatatcggctcactgcaacctcaaactcccaggctcaagtgattctcatgcctcagcctcccaagtagctgggattacaggcccgagtcaccgtgtctggctaattttgaaatttttttgtagagatgggtttttccatgacggccacactgatcttgaactcctgggctcaagcaatcctccagcctgggcctcccaaagtgctgggattacaggtgtgagccaccaaccctgacctggactccaggttctaagagccctcaccccagctccccacccccgggacttagccattttaaccatgcctttgatgatcttagggcaggatgggaagggaaggatgaggatgggaagagggcagcatgctggggagggagggacatcagcggaaggagagggggaggagtaggtgacaatgttcaggatgtttccctttaaggagcccgtatattttctcacagtgtaatacagacacagcgccagccctaggtgtaatttaaaaatttctagtagccatgttttaaaaaggaaaagaaacggagaaattaattttaagatttttgttaatccaatatatcaaaaaatatcattttaacacataatcaatattaaaatataatgtgatgttttccattccttttgttgtacacgtcttagaaatctggtgtgcacagagcttctgtattgggactaatcacattccaagtggttaataactacataaggacagaagttaccatattgcacaacccaggtggagacaaaatgaacctgtcaagttggggctgggtggctggagttttcatctatatactaagaaggattgggggaggtgggaaggggaaagaaggtttttttaaaaaaagatctttgaaatgattagaatccttttcttattgaaatttcagacttaaaaaaacatctttcaggaagaggaacaatttgtctgaataaatctgagtgcgtgtatcttatgattttgaatttaatcagtgccttattgtggtcaaccatattttatagctgtatagttgaccatatatagttgaccaactatacagacgaccatatattgaggtcaactatacagatgggcagccctttccagacttccagcatctctttctaaatacagttctgtccaacttgatacttctacgcacacagcgtcttatcccccctcttcattttgggggtggaacatgactaataagaaaatggactgaacattcaatcaataaaaatagttacaaaagtattctcaagttgcataaatagggacagggtcttttttttttttttttttttttttttttttttttttttttgagacggagtctccctctgttgcccaggctggagcgcagtggggcgatctcagctcactgcaagctccgcctcctgggttcacgccattcccctgcctcagccttccgagtagctgggactacaggcacctgccaccatgcccatctaatttttttgtattttcagtagagacgggctttcaccatgttagccaggatggtctcgatctcctaacctcgtgatctgcccgcctcggcctcccaaagtgctgggattacaggcgtgaatgttgcataaataaagctgcttttaagtgaactatattttcagcttctggcagcagcaacttccacaaatgttctttggggaaatacccgcaataaatattcaagttgaaaagagttttgtgaactcaagacagtacttgaattcacagaagattgaccttatttaaaatctgttttcagctaccaattctgtgttcaaggtaatgaactctcctcctaatcgaacctgaaattcacctttcaattatgcatcaaattgcaaaaccaaaggacaggcagataaatgtgaaatgagcagttatgttgtaagtaagacatgctttgttccatcatttgtgggcacaagaactcatgttcgttgcaaatcttcctggcagtgtctgagaacataccaaactgaaagcatctcaggattgtgcctagggagagagagaagaaaagagggaggaagggctggagggagggggagagagagaggaagaaagagaagagagagagagaaagaaagaggggagaagagagacagagaagagagaaagaaagagaagagggagaaagagagagagaagggagttcttctcttacagcaactccccttccttttttgcattacatgagaaaatggtctttcatgtggcagaatgaagaaaaggcctgtgtttattttctctatctttgactctgagggaagctgagctgagtggtggtaaataactatataactgaaattgccttgctttgtgttaccttaggagtggcttgttttgtagaggcttcagatttatggagacagattacactccactatgtaaatcactttgtaaaagtaaaatcgtaattcctttgggcctctagggtacaattcgatgcactaaaacaataatttactattaagtgggacccttggggtggctttttcttagagaatcgtcttctcgttgggagactgattcattaggctacaaaaggaagcctccctctttcttgtctactgtgtcacgctgtgcttatacgtccaaaagcagaaagttcaggctccagttgagaaggtggaaggtcagttcttgtgtgtctgacacagggaaggtatcatcgattctcaggaatgacgaggtgacaccacgtgggggacatgcatgtcttagcctaggatccagcaggactggcgcccttcaaccatcccggcttcactggcgtttgaggaaaggccttcagacctttccttaaactgccaggacatggcactcaggtctgccatgatgttgggaaagtgaaacatagtttctctcagacatttaacttgcatttgtgtttgatttagagcgtgggggtattgtattttaaatattctcatatttttgattcgcagaaataataaccaatcaattgctcaatcctcaactgctaaaatgaaatgcagtttggagagataatagttaaatatttctaaaactgtgccctgaaattaagaagacccatttaagaattagtagcttcaggttattgaaaatgtaattactttcagcctttgtaattttgttcctcttttgtggatgaagacgagagttccgcaaacaataccattcagtggaatttaatattcaagagaggatttgggtggttcaagatgaaattaaatcacatgcttgaggaggctgcattatgagcggcctccaagctacattcttggattttctagttgctggtttccttctaagcatggtgctcctcctcctctccattggtagccagtggtttcattgccactctgatgaccagctccctaacagctccataatccttcttccacacctacgcttttctatttcattattaagtgaacaggatttagacaacttttctctcatgtctctttttctcttctcacggctctactggtttactctggaatttaatttcttctttgctagcagtttctcaatatgtgattcaaagaataagggacaagaaaagaggacccctcagtataacacacgcctattctgcgtgagagcagcgttcacgttcttgtttaataggcctgggaaatgcttcctaaagcaacagtggagtggagagttggtaggaactgttaattgtcttgtgttgctttagaaaattgcttgattacagtggagacatttcaaaggagaaaaagctccagtatatgatggcaaaaccatgtgtaaatcaactctgagttgtaaatttgccaaaatattcttttacctggacacccggtcccatcctaacccctttgttcttcaaaaatgagaatatgctggatagactatttatagcctgctttctgacagcttaatgcatattaggattttttctgtataattaaatgctttataatactttttatgattacatattatttcatcttatgacagttgatcatttatttaaccatggcagtgtttccagttttttcctatttatttcaacaaaaccatgacgtatgtacttatgtctatctctattcccatgcttcctggctgtctaatttccttctccatattgtgggttgaagcccttccctggccaggggtgttgcttgaatgaaccaacagtatggtttatctcaccaacaaacaacttaggcgtaggagtgatcccaggaatccccaagcatcaaagtcacttattttacagatgcagtcaaggcctagagaagccaggaaatttacgaaaattctcctagcgaatgagttcaaagcatagactgaaacccaggattcctggatctccattccatgctctttccatcatactaggtcacttcccaaagtgcctgaaaaataaaaccttcagagccacgcaaaagcaaaagagccatctatctatcatctatctatctatctatctatctatctatctatctatctatctatctatctgtctagacaaacacatatatacatataactgtaacttagagcaaaatgtaatttataattacattgttagttacttaaaaaaaaaccctcactacaatattatacagatctccctacaataagctagcatgaaataatcctaggcttattaatcatgtccctgaaaagtttccagatgagatagagacaggaaagcacctgtcagcccccaaaaccctacgtctccaagtgctgagtgcacacacacagccgtccggtgttaagtgctatggagacacctgaagcctaggcatcaaagcattcacctgcctttcctcccacctcccatcaattcttggaagacactaaaacaaaacttgtccaaaaccagtaaagcgatcaaagggccaaatctcaatggcttttcccaagtgtcgaccagagtcttgaccatcgctgccccaggctcatgggctgtaacaaccacagaaatatgctttgaaacctaacatgacaacctcatataattgaaaagctgccagtgttgaggaggtacagatatttaaaagtcagaaagttgccagccaccctcagaaggtcttcataatcaagacacctcagtgtctaaagagcaagctcctcatgcctgtagttctttgtgggaatctgtagcctcttccacttggtcatgaaacagccacagttctgtgctggaggattttccagataatcccagaagtgggcttacatttcctcagttcaagtggtataaccagcaccaacaggactccagcaggatgaacacgcctgatgacatcactttgttggtgtcagcagagacttgagctcaaattgagtggtgttgctgcatcaggaaaataaaccagtacttaccgacttggagaagacagatctgtgaaagtctgaatcgcttttagatctttgcaaacagttattgcaagcctggtatttttcagatacctaataatatagtagtattttacataattgccttccctaacattcgtagaaaactataaatagtcctcttaatgtgcacagaagtacttatattccagatgttcccatggtgaagggacttgagctataatttccacctatttcagaagcactgagacaaccaaaacttgacaagctcattcttttcttttccctcctacatattcccagcccccatcctccaagccagtgctcgagataaggccgtctcccttcccagtggggctcaagtgcatctgcggtgattcctggcctttctactccctctgaaacaaacttcaagaaaaacccatcttggaaaaatgctctagcctttgctcgaggagaggtgtattttgtgtgtcatatgttgcttgtttctgttttcttttttttttttaatttttatttttgcagatggagttttgctctgcagcccaggctggagtgcattggcacaatcttggctcactgcaacctctgcttcctgggttcaaacaattcacctgcttcagcctcccaagtagctgggattacaggtgcataccaccatgcccagctaatttttgtgttttagtagagatggggtttcatcatgttgaccaggctggtcttgaactcccgacctcaagttatccacctgcctcagtctcccaaagtgctgggattacaggcatgagccaccacgctcggccccttgtttctgtttttaaaggctactggaggtggagtgagtgaaggcttcctgctgttacttgattgaggtttccttttcttgactactgtgttttcacgcctgcttataaaactactgacgtgtgaatctagcaaaaagtttttcctccacaatgtgaattagaatattgactaataattattttgaatttttttaggttggattaaaatttgcactactattccagaaaactcattgtctactagaatcagaaccatattttaggctgggtgcagtggctcacaccagtaatcccagcactttaagacgttgaagtgggaggattgcttgagcctaggagttcaagaccagcaggggcaatatgacaagacctcatctctacaaaaaaaaaaaaaaaaaattagccagggtggcggcgcatgcctgtggtcccagctactcaggaagctgaggtggggaggatagcttgagcccaggaggtcgaggctgcagtgagctatgattgcaccactgcactccagcctgggcaacagagcaagaccctgtctcaaaaagaaaaaaagaatattttaatcatgttggtcctaacttgcattctaagtttcatatttaaaggcaccatgcacctgactcttcccaacattgagcatgtggttggagagggtgcaggtctggggtaggggtgaagggaagggtctggaagcctctggtcctcattcataaaccctatagaatagaaaggagggttgctttgctaaccttctgggtggtggtaggaactctttcaggcaagaggaacatcagtatcaggcaagactcccagggaagttggggatctgggagtatatttttgttaatccaactctttgtacctctcctcaaaagtctgtgggcctccacaggcgtaggcactctagagttgggttaatgcaaacagatttccagatctgcaacttccttgagaattttgacagatactgacctgctgagaacggaccaggtctcctttgccaacctcccattcacaactgctcttctccctccttacaaaagaaaagtgcacctcttgtgggtgccccagaacataaagactagagcatcaagccaagggcaatttgacatattggtgtttaatcaaaacatcataaacttgcagtcacacatatttctgttaaaggaaaacatagcttcagagatggagttttttaatccaacttagatgctcagactgttttaaactgttgtttctcctcttctatctcctaagtattgacagagaacttgccaccagagagaaagcaagcaaggagagaaactcacatgcagtgggtggcaagtctgtaagctttatcccacagcactctttgaagtgagatactgtctcagagacacatcttaacacattcacttgaattgaggaatgagggcggattgtttctaacagaaagcctcagtaatttcactgattggttagacaatgaggattgactttatcaatttgttcataggatgacagacattttccataaattaaatgaactaaattagcagctccaatgtctcaaataaaatagatgtaaagcccttgataaggtaaaagcattttatcaaaaatagtctattggcaaaggcatattgaaattaacagtatttagatttccctaacactttctggtaacagtgggtgaaacaaaatgcctaaatgtaagaataaatagatataattaatcatcatttttggttatttttcccaaagttggaaaattaaatgactccaatgattgaataacaaatcttttgaatcttttgtaaatcagatggtttccttttttagggagagtgtattggcttttattataattaaaggagaagctaattgagttgtcacctgatagaatactaaaaacaatttttgatgatggatttttttcttttttttttttttgagacggagtctcgccctgttacccagcttggagtgcagtggcgcgatctcagctcactgcaagctccgcctcttgggttcacgccattctcctgccccagcctcccgagtagctgggactacaggcacccaccaccacacctggctaattttttgtatttttagtagagatggggtttcaccatgttagccatgatggtctcgatctcctgacctcgtgatctgcctgcgtcagcctcccaaagtactgggattacaggcgtgagccacggcgcccggccgatgatggattttttttaatttttgatgagggattattaggtgatttttggaatatcccttggaaagagttcaaagagttggatgtcactgttgtaacaaagtgcctgccatttatttatagaacaaaatttttttagagcttacatgtgtaaaaatgaaaactaggaatagaattgaagctgaaccttgtcttactccagcaataagtaatattcacctatagataaatccatatctagagagacattttcaacagcagtttacttttatatataataattatatgtcaacatttgaaatatatttatgttgttttgatgaattgtaaactaataacaattatagcaataaatcagtccagataaaaattaatgcctagtaccctatggctactgaaagtttaaaaagcttgaaattccaatttatgggcatatttctgtggcaaagaatcaggactgagtgattgattaatgccttgaagcataaagatattgcaacgggataaaattccatgggagaagtacaatggaaatgtgggttcaagaagagaaagaaattataaacagttctgaaagttaagcaacagaggtccacatcctttttaagtcaatgttgatggttttcaacgctcatggtatttagactccgttatttatatgtaaaagagtactccaacagttctttaaatccaatttttacaacataaagtatgtcttttgtgactatattaacatatgatgaaaaaattaaatgtcagccaaaacatgtgtgcaagagaaatctagttttgtttcaattattatataagctacaggagaagggtctgaagtccattcttcaggtaacttgggtttcttgatataagacagaacagtttttcattctctttcacctgtgcttctgtgaacaggcaaccagcctccaatgcccggtgtggctaaatgttccctttgctgtcacctgagtgtttttaagcttcagcaacatatgaacagttttaaatttattttttatttttggatacagggtctcgctctgttgcccaggctggagtgctgtggtgccatcatggctcatggtagctttgaactcctcagctcaagcaatcctcctgcctcagcctcctgagtagctgggactacggatgcatgccaccacacctggctaatttttaaaatttttttagagatggagtcttactatgttacccaggctgctcttgaactcctgggctcaagcaaccctcccgcctcagcctccaaaagtctggaactccaggtgtgagccaccacgcctggcctggaccccttttcaggggaaaatatgttgtggaccccctttattgccttaaatttttttctatagtaatgctgcttacaaatacaaaactccatatttaatcctttatactcatagctcttatgcattgatttataaaaacaaatttacaagtcaaaaacaaatcacaggctgggcatggtggctcacgcctgtaatcccaacactttgggaggctgagatgagccgatcacctgaggtcaggagttcaacaccagcatggccaacatggtgaaaccctctctgtactaaaaatacaaaaattagcagggcatggtggtgggcgcctgtaatcccagctactcaggaggctaaggcaggagaatctcttgaacctgggaggcagaggttgcagtgagccaagatcatgccactgcactgcagcctgggcgacagagcaagacttcgtctcaaaaaacaaacaaacaaacaaaacaaatcacaaagccaacaaaattaaaatgttacctcacaggactgttgatcttgtttgttgaagctaaattgctgctctctatgaaacagcactcattgctgtggcagcagttttgttgttttgtttaattttgacatccctgtattcttggggggcatctaatggctcagtgatttccttgcctcttctctaactagttgaaatctttgtgttcagttggcacaaggtggtgtcacagtttcgtctgccaagatctctccttttcagaccccactcttctggcagtagaccaggacaattatatgttccttggtgacaaaaagattgtaaatacaaatgcaggtacctcactcctgggcagggatttagttttggagtggtcaccaaatgatgctgcattcacttctattaagatctttaaaaattagcatcaaaaaatatgtattgtacggaactcatggcccccaccacatcctcagactcttggagccctgtagatgccagtgtgggacacacactgcaatctcagctgttacccacaacctgaatgggtgcagcgcttaccagtttagacaggtctgagaagacatggaggaaagagaggtcatgaaatggaattttccatctaagccactctaagcaggccagaggcaaatcatctttgaattgcccaggatgcctggcagagtgcctggcatgtatggtaagtactttatagtttgtttgttaaagtgatttgtttgtttgtttctgagatggagtctcactcttgttgccaggctggaatgcaatggtgtgatctcggctcactgccgcctccacataccaggttcaagcaattctcttgcctcagtctcccaaagtggctgggattgcaggcatccaccaccacgccgggttaatttttgttttgtttttgagacggagttttgctcttgttgcccaggctggagtgcaatggcgcaatctcggttcaccgcaacctccaccttctgggttcaagcgattctcctgcctcagcctctcgagtagctggaattacaggcatgcgccactacacctggctaattttgtatttttagtagaaacagggtttctccaggttggtcaggctggtcttgaactcctgacctcaggtgatccacccgcctcggcctcccaaagtgctgggattacaggcatgagccaccgtgcccggccaatttttgtatttttagtagggacggggtttcaccatgttggccaggctggtctcaaactcctgacctcaggtgatcctactgcctcggcctccctaagtgctgtgattacaggctgttaaagtgatttaaatagaagactcaagttattaagtcacccaggatgggcctctgatgattggctttgtttctaaatatcccaaaaataatttatctgggtttattaccatattatatataatcctaagctcctcctatatatttatatataatattataacacattatatattatatatatatttcatatataatatatagtacattaaatatatttaatataggtacattaaaattatattaaatatatattaattatagtgaagtaaaaatattatatactatacatgagttataaataatacatgtgttatataatatataaaattatattataactcatagatcatatgacatatattatagaggctggggtggggtgaggctctggtagactcatctcgaagccactgtggtttggcaagtgcacttccattgtgtgtctccggagagcatatctgaagggggccattggaggctggggccactattgctaagcgccggtgggaatttaaatcattggatgtgttgttcattattcccagtcctgtctgagtctgccatggagaaaggtgttctcagcattgactccccagcctttctccaaccttaccccaagcttttgaataatacatgttttccttgtccgcagatgattttctcttaaaaacatacgatgccatctaatcccaaatgaggggctaaatagaacccacacttttaaaaataaagtcatgtctttcctataattttttagcacttagtatattttgagactgtaacattctggcactcttagttttcttccagagacgttatcaagttctaagtcatgtcgctaagtcagcaacaagctttcttccgtgcctgatagtctaagaactcaacacacaggctttaaaactacattaccttggtttaaatctcactcttgcaacttatttgttctctgacttgggaaggccacttaacatttctgagccttagttttctcatttcaaaaatggttgttgaaaggactaggggaaataatactgatcaggtttttaatcaccatgcctggcatcgcaaagagctcaataaataatagctgtttttctgtcattgcctcctaaaatatataaattcacatatgattttgggaattgagttcctcgaatgagatttccaaagactttattggatgtaattcattttctagaacttaatttcttcccaggtccttccagaatgcagcatagtaacatcaacacacacctatatacagtatcctgaaaccagaacagccgttttactgcactgctgtttgctcataaagcagtcacattgttggtgtctgctctgcactcaagaaagaagggatcaacactttactggaaataagacagaagactctgttggactcaggagctaacttgttataatttgctcatttgagtcttaggactttctgatatgcaaaaccttgaattctttcatacttgactagttcttttctcacttttaaattacacgatttcacttttaaattatagaacttacaaaaaattctgaattgaaatctctgaacccaaagcagacacactgggttgagctgtcttacaagaaggtacaccaaactcagtagtgtggatcccagtctcaacactgccgcagcctggctgtgtgatcttgggtaacccactgcccttctctgggcctcagtctcctcttctaccaaatgagaggatggactccatgaaggccatgattctaaactcccattattctaaaagaaagaggcaaaattgacttataatcccaaggaaaaagtaattaaaatgttaatagagctctatagtttacaaagcactgtctcaaatgattcctataacaatgctatgagatgttatcatttgtcccattatggatgagacttttgccatactgataaataaagtgacaaccaagaatatatagttcctgagctaagaagagatccaggatctttctgtctgggatattggatttctaaattttccctaaatttatagtcatttgattagaggggaaattgcttatacttcaaatccagaaaattatctttatcctcatggctacttgcccattcacacagattctacaggttgcatcattcattcattgactaatttcatcagcatttcctggctatgtcagtacagcatcgttcaaagtgctatgtggagattcaagagaaggacacataagcacgagctgttcccagcagtgggggaaacggcatgggaaacggatatactatccaggtctccttatgcactgatacagtcccagcacttacgacagtatctggtgcatggtagaagagtgaatgaatgaatgaaaccacaagtgggttgaagtatggggtcacacaattctgaccaaccctcttctaggaaggttcccttccattcaccacacaggagtcagaacttctatctttctactcccatttctgtagcatgtatcacattggggttgttttcctttagtttaaagtttttcatcaaagtcatacatgcttggagttaaaaatcaaatagtgcccaagggctggaaataaattacagtgattctttccccctcctttccctctccccacactccagttctcatacctcgaggcaaccactttgaaccctttcagctgcagctctggaaattacctgcacagcactatgtaatacacgtcgatgctaaagttcttgatctagccatttcagatggcatctatcatctgttatgatggatcactattttaaattaagtcatatttttatgactatttatgacttactttgtttcaagcaccctgtcagctctaccatctgcctgcctcttttctcaccctggtggtggacaccctcggatatctagggagccccccattttttccagaattcccctctccctaaacccccatcctcctgctccaggttggcccactgctcctccatcctcctccccatgctcccagctcaccaccagtcttgcctgctcccagggcttcatctttccaggtttgctccttgatcatccacttctgataacagaaggaaaggaaggtagagatctgagtctagtgtgcctgaaaatctattttgcctcacatgtgagtgagcttagcacagagccaaattctacattcctgttttctccagatttagaaggcattgctcccttatcttctagagtctgtgttgaggagtctgatgccatgctctgcttttttctctgcttggaaagcttttggggacatttatttatcttcattgttcacagcaatgtgccttgatgtgggtcttttccttctgctgtgttgataactcagtcagctctttcagtctagagatttaagtctcagtgttagaaagtgcccagtgattattttttctgaccattttctctgtgctttcattctgaaacccctatgaatcagactttcagaaatctcccatgtctcttttctttcatattttctatctttttatcatttatattaatttactcagctttgtgtaccaacacctacagtgaattttttaaaatctggtgttgtatttgttttaaatttcaagggtgcattcttcatctctgattgttaccattttatagcattttatccttgttttagaactgcaatgtttcctgcttctaaggatagcatttgggtctttatttttttaaatgttctctcttccctgcatgagttccattttgcagttgtttacttggggcctcctcgtgttgagggttctcttggtgtgtttggaaaacctcagttgtctggcattgaagatcatcaaagactaaatggaagctctgtgtgcaaggtggaatctgttaatggttccttgagggtcccctaaatgatattttccctagagctatccagggaatccaaggaggagaaatcctcccatctcctgaaagtggagagaagagaaggtgtgggttacttgtgacctgccctcaggctaaaagaccattccattggcagacgttgagtattctctccctcttttcagcctcatccccatctccattttgtgaatggctttaagctaagctcctccaattcagttccttcagaaaatagatctcaagcctcctgccaggaagcagtggctggcagctagcaccctgtctgagacagcagaagagggttaaacattctctgactccccacgcaagaccctgctttcaactgggtatcccagcccctctgtctgacattcctggtacccccacattctgacctcttggggttcaccacgaccttcttactgtagattccattctctaagtgcactttgggttgtgtctttctcagttctgctaagtcaatgacaattgtccatctaatttttgtcctgaaaaatttcattgaactctcttctctactgatgttttcttctatattctttgtccttagggatttattcctttttacttccttactattattttatcagaagtgtcagaagggagaggtgatgcatatacgtttcacataacatctttgggcttgtgatttgctgatgtaaacacctgttcctatttatgaatgacttcccctcctttctctttgggaaagtcccttcctggttgctctctggtttctattttgggaggcatgatttcccctctgctattggctttgttggttcttttgttctgctgttggattttcccacctgttgtatggtaagttttgttgtatggtaagtttgcacactctgcttgcatggacatttccttgcccttctccatttacctttctgtatctggaagtttctgagtgctcccgtgcagcctcctaggaggacaggtcagacctgggattcatgcccacaatagctcagcgcagtcttctctggggcacatcagggctccagcagacacgtgttcatgtctagagcctccttccaccccagcaaactgcttgtttcttactgcaaccttgcagtgggggaggggagcttttctagctttattcacaggcaaagaatggtcacaggctggagtttccagcaggcagggcacctggcattgactctcactgtccaaggaggtggcccagcccccttcctccatagggttgacttcttctcacaccactgctggcttccaggctgctcacccagagcttcagcccctgctcacgacaggggtctccactcctggtccacagagatttacatctagtttttgttttgttttatttttactgtgactgttatgggctgaaatgatatgttgaatgtcccccaaaatgatatgttgaagtcctaactcccagtacttcagaatgtgacctatttggaaagagagtctttacagaggtaatcaagttaaaatgaggtcagtggggtgatgaggtcatgggtgtggaccctaggatttgactggtgtccttgccgaaaggggaactatggaaacagagatgcccagagagaagacaatgtgaggagacacagggcgcaccaccagggcggtgcttccacaagtcaaggagtgctgaagattccagcaaaccaccagatgccagggaagagctcggaacgggccttcctcacagtccccagaaggaaccaaccctgccgacaccctgatcttggatttccagccttgagaactgtgagacaatacatctgtattgtttaagctgccctgtttgtggtcttttgtcctgacatccccaggaagctaagttagtgactgtatattttaatccttcaaatatatactctatcatctccatgtataaatatatcaaatatatatttggcattagaaaggggaggtttcgcatgcattcctctaccacactgaccagaaatctatcacattacctggtttccttatctgctcaccatgaggcactctgagtccagaggttttaattcccctctgtaaccacagtgcctggtctcttgaaagtgctcaagaattgctttgtgaatcagttaataggctgagaaggtgagggaccgatcaatctgatgtgtggttattcagggaatacttctcaaaagaggtaaaaataggccgggcgcagtggctcatgcctgtaatcccagcactttgggaggctgaggcaggcagatcacttgaggtcaggagttggagaccagcctggccaacattgtgaaaccccatctctactaaaaatgtgaaaactagccaggtgtgaagggggcatgcctgtagtcccagctacttgggaggctgaggcacgagaatcgcttgaacccggtaggtggaggttgcagtgagccgagatcaccccactgccctccagcctggatggcagagtgagactccgttaaaaaaaaaaaaaaaaaaagagagagataaaaataccaaacaattggctttcatatgtatgttcctaattttgttttctaattgaatgcactagagaacaatctcgtacccctgggcctaccatatacatgagggtatcccatctgtcccagaatgggctttccaagaacgaggcttacatcataatccagacccttgggatgatctcatactttctggtcctttcctgaactctcatttattcatccaagaattaatgaattccttgagcaggtagctcttgagccgtcagtgacagatatttgttgagtgcaaactaagtgttaggaattgttctggccatgggatgtatctgtgagcaagacagacagcttccgtcctctcatgaaccctggagagagtcacagatgattatgtccaacagctttcggtgactagattgtttcacacacaaaatccacacctctggggaagaacaggttgactccctaggcgtgactgagtagagcaatttgttgaaagtacaattttttttacttgtgctctgagacccctggcgcttgtaagagcagagccatctctgcatggctgtgttgggcagatgcatggagctgtgaaatttgagagacctgggtttgaatgaagaggctgacccaattcctggggccttgcctctcttactgaacctgtctggatctcagggctcacctgtgaaagtgtgggagcaatcctacctcacagagagccgggagagcctgatgagggaatgtgttcgcaagactgtttcttaaccatatatcaaaaaagtccccagtattcaatatgagattagatttccttggaaaaacttatacagaggtgctagggttgaagaaattatttgtctatttctctgttttggtggcggtttcccacctaccctgggatacaaatgttattggtgatatagatactgtccagccctccatcactgtgtctctgctgggattccatgaccaaaaggagagaactagaaaactatgctctcaatagctgagtgctctgtggtcctggccccgggtctcgcactcagatttcacagtgcatttgattcatggtgcatgccaagaagaacgctggcactttggacttggtaaatggcttacttggttttcggttgaattttgtgctgaggcacagctaattagaacccatctgaagatggcataaataactgggtacttccacaggcctctagcctttaatgttccaatgacagtcctgacctccatcaaatgtctcctcttgctcattcacccccagcccaggctggagtgggacatggcaaacagcaccagcagcagcagtaagaaatgagacactcaggtgacagccatgccagtgactatatgtcatgttttatttaaaaattctccttacccattttctgggatagccagagcaacctactttatttttctgcttggttccaggtacgtggggacagatggctaatatttgccagactgtacatatatgtacataaataccttttctcctctagccttgggcttaaatattaaagatgacaacccttattattgttagggattgtgagtaagagaaaattctcattttgtgcactcaagcaaaatgacttaatcaatttctccttgacttacacaaagggagtctgaagttaaagttcatgctttagaaggctttattgtggagacttttttctctcacactgcacatcgaactgactttttattcaactgctaatgatgttgggataattaagataagcctcagaaacactgggtggagacaaatagaaattccacttatatagtggaatttctttaaaaagaaaattgccacagtgtttatcgtcaatgaatgcattatgcaattgtatatcattgtaagtcaagtattggtacctattgtgtctatatgacagttttcaattcacccatttcccataatgtagagtaaatcagctcatctaaacagaacaaaacaaaacaaaacaaaagaaagaagggggcttaatggtaggtgtcctttttttagcaatgatgtccttttagttacagcttgtagtaaaattagagggtcctggggttgttttacattattttttgttctgcttcttaaaggttacttaaggttttgactctgatgaatcttagctttactagatctgggtggcatgagaaagaatttgggaagttgggagtgaatgttgcaaaaaggcaacacaaaatacaggatggaactggtctaaaaagacagtgatactgatgtaagggatgatggcgtctaaaggccttgctactcaaatatggaccagcaatatctacatcaccggggcgggggcggggtggccctcattagaaatgcagattcccaggtcccactccagattcactgagtcagaatctgcattttaatgaaatccccattgaactgtgagaagcactgctttcggagacatttgagatcagagcgaattcaaacattttataaaggagaaaatagacttactcaagatcactgacaacatacaacaattactgttgttctataatctcccctatctgttcaacctccgcggcatctgtagttataatccctatttaaattcctactattatttgtgtttgttttcttttcttcttgactaatattgctaaatgtttattttggaattttgtcccctagaaaagagcttttggctttgttgaacctcactatatatatttcctatttcattaatgtctacttttacctttattatatttcttccctttttggcttattctgatattttttcggcggaggggggatgggaatttttcagttgcctcttaggcttattacattttagattttcttctttcctaatacaaacatctagaactataaattgttctctaagtatcatgttagctgcacctgacaaatgttgatgggtaactttcagttacagtttagctccaatattttctaatttccattgtgatttcgtttttaatacattaacagatttaaagtgttttatgtaagtttccaaatgcacaaggtttttaagttattgaattgtgattaaagagtatagtctatggaatatttaccaaaattcgtatgttaaggtttcccacagagatggtgaatttggtagcttctttggtagagctgtcaatttttgatttatgtgcatttgagagtctgctgttagttccattcaaattgagaactgttacatatttctggaaaattggacctttcatcattcattatgtcatggcctttagtgctagtaacgctttttgccttaaagtttacttagtctgatgttaatattgatatcactacttaatttctctttgggttagcattaccttggtgtatgatttttttttattcttgacttttaatcttccggtactcttatgcttaagacgtatgtctcttaaacagcatacacctacacttaaaacaaaaaatccagccatgcgatttttgcctttttaccagaaagtttagttcttttacatttatagtaattactggatttttatccacatcttattttgtactttctatttgttctactattttgtagttttttcgttctttacttctttaaaatgtttcttttttttctttatttcattcctcccacctccacttatttggaaagtatgatgcaatatgtctttttcttagtggttactctaggacaaacaagcatgctaacaacatttaaagttaattaataactttatgctcctgttgaggactttagaaagccttaactacagtcatgctcctccccacttatattttattcttgcccgttatttaatccttacctttccctacaaattagatattattaggccgggcgcggtggctcacacctgtaatcccagcactttgagaggccgaggccggcggatcacgaggtcaggagatggagaccaatctggctaacacggtgaaaccccttctctagtaaaaatacaaaaaaaattagccgggcgtggtgggcgcctgtagtcccatctactcgggaggctgaggcaggagaatggtgtgagcccaggaggcagagcttgcagtgagcccagatcgcgccactgcacttcagcctgggcgacagagtgagactccatctcaaaaacaaaacaaacaaaaaaacaaacaacaaaaaaacaaattagatattactatcaatcaagtgaagtcactttcctttggcttgaaataaatcctttagaatttccattagtcagagatttgttgttgttgttttatgataaactctttatgtttctatttatattaaaatgtctttattttggtctccttcttataagatattttaattctttcacatattgacaacgtattctgctgtcttctggcttccattattgtgactaagaaatcagtagtaagtcaaatgatcactttgctgtgggtgatctttcttttgtctctctagctgcttttgaggttttctcctttccaaatttttgcagtctacccatctgacaaagggctaatatccagcatctacaaagaactcaaacaaatttacaagaaaaaatcaaacaaccccatcaaaaagtgggcaaaggatatgaacagacacttctcaaaagaagacatttatacagccaacagacacatgaaaaaatgctcatcatcactggccatcagagaaacgcaaatcaaaaccacaatgagataccatctcacaccagttacaatggcgatcattaaaaagtcaggaaacaacagatgctggagaggatgtggagaaataggaacacttttacactgttggtgggactgtaaactagttcaaccattgtggaagacggtgtggtgatttctcaaggatctaggactagaaataccatttgacccagccatcccattactgggtatatacccaaaggattataaatcatgttgctataaagacacatgcacacgtatgtttattgcggcactattcacaatagcgaagacttggaaccaacccaaatgtccatcaatgatagactggattaagaaaatgtggcacatatacaccatggaatactatgcagccataaaaaaggatgagttcgtgtcctttgtagggacatggatgaagctggaaaccatcattctcagcaaactatcgcaaggacagaaaaccaaacaccgcatgttctcactcataggtgggaattgaacaatgagaacacttggacacaggaaggggaacatcacacactggggcctgtcatggggtcgggggaggggggagggatagcattaggagatatacctaatgtaaatgatgagttaatgggtgcagcacaccaacatggcacatgtatacatatgtaacaaacctgcacgttgtgcacatgtaccctagaacttaaagtataataataaaaaaaaaagattttgtcctttcctttgctactctttagctctattatgatggatataggatttgtatatttcaaaaagttttggaaaattttcagcaattattttttgaatgctatctattcttcattcttgttttctacttaaggactcagattagacacgtattaaacattctcatgttgtacaccatctttcttaacctttgctttatattttctatatcattttttgtaatttccactgtaatttcttctttaaaccacaggttgtagaaacatgttgcttaattttccaacatttggaatttttctagttatatttctgttatgcatttacagtgtattattactgtgaagagaatatatactcaatcttctatatgttgcctaatttaaaaaaaaaaaaattagcctgggtgcggtggctcatgcctgtaatcccagcactttgggaggccaaggcaggtggatcaccagaggtcaggagtttgagggcagcctggccaacacggtgaaaccccatctctactaaaaatacaaaaattagctgggcatggtggtgggcgcctgtagtcccagctactcaggagactaaggcaggagaatctcttgaattcaggaggcgaagattgcagtaagctgagattgcaccactgcactccagcctgggtgacagagcaagactctatctaaaaaaaaaaaaaaaaaattaaaattaaaattaaaaaaattaaaaatgatacatatttgtacatatttatggagtacaagtgatattttgttacatgcatagaatgtgtaattatcaagtcggggtatttggggtattcaccaccttgagtatttatcatttctatgtgttgggaacacctttaaattctctcttctagctatcttgaaatatataatacatgattgttaactatagtcaccttactctcctatcaaacattagaatttatttcttctatttcactgtatatttgaacccattaaccaacctctcttcctcccccatgcacatcctttccagcctttcataactatcattctactctctacctccatgaaatcaacttttttaggtcccacatacgagtgagaatatgcaatatttgtctttctgtacctggcttattttacttaacataatggcctccagttccatctatgttgctacaaatgacaggatttcattattgttttatggccaaatagtattccattgtgtatttatattaacaccacattttcttctttttctttttttttttttttttttttgagacagagttttgctcctgttgcccaggctggagtgcaatggcatgatcttggctcactgcaacctctacctcccaggttcaaacagttcttctgcctcagcctcccaagtagctgggattacaggcatgtgtcaccatgcctggctaatttttgtatttttggtagagatgggttttcaccatgttggccagcttggtcttgaactcctgacctcaggtgatccatctgccttggcctcccaaagtgcttggattacaggcatgagccaccatgcctggccaccacattttctttatccattcatccattgatctttatttccctagactgcattctaaattgtttcacacccatcttccaattaacaaatacccatgttagctgttacctaattagttactccgctgatctttctaaaaaatgtaattgtggccaggagccgtggctcacgcctgtaatcccagcagtttgggaggcctaggcaggtggatcacttgaagtcaggagttcaagaccaaactggccaacatggtgaaaacccatctctaccaaaaatacaaaaagtagccaggcgtggtgacggacacctgtaatcccagttactcaggaggctgaggcataataattgtgtgaacctaggagatgaaggttgcagtgagttgagatcatgtcactgcactccagcctgggtgacggagcgagactcagtctcaaaaaaaaaaaaaagtatatatatatataattgctataatgtaatatgtatgtaattgctataattttcatttattgacgatctactagatttgtttttaaatccacatgtttctgtccaaatttccaagcttctacttaatttttttcctgaaatctacatgggattataaatctttaattttaaaagaacatattagatgtagataatgagtattctttatctgaaaataagtatgtgaacttttaaaagatctatttctactatctgttgtttctgcctcttctcattcatagtaacttgattcctcataaatttcataattttttaagccacttatattctttgcaactttacctgtgggaattcttgcagaactgaattaaattatgtttttttttctttaggaaggtcgcttacttctgtgaatcatctggagatgctacaaacaaaggattttaatttaaagtctgcttgatgttttccagatcacacaagtggttagttaagataaaatcttgcatgagggctggcatatggttgcaaattctcaagggatatatttttttccttctccacctgtcagcaaggctgagaaaagcaaattttttgctataaatttctgtgcagtggggcttatgtctcactcatatgcagtgtaagtcccagctatatatgggggcctcctattatattccctccttgggcagaatctgggctttatctccagccccctacacccaaggtacttgcaaagtgaaatcttaagatctggtggaaacccttagaggaaaagctagctttggaacttattaacctcccagaggtcttgattttattttatttttagacttggtgtattcctcacttataatcatttataaaatttggtttaaaattttttaaaaaccattttagttgttccagtgaggacagtcattgtgtacctgactgccatattgctagaagaagttaccaggtattcttgaaggaaaacagaatttaagggaagctgtgaagactgcctatatacatcttattgttgcaggcttagggcaatgttattgttaattcaggatcatagaagaccaaggatacaataagtaggtgtattaatccactttcacatgctgtaaagaactgcctgagactgggtaattgataaaaggaagaggtttaattgactcacagttctgcaggactggggaggccacaggaaacttacaatcatagtggaaggggagacaaacatatccttcttcacatggtagcaggaaggagaagcgccaagcaaagggggaaaagcctcttataaaaacatcagatctcatgagaactcactatcacaagaacagcgtgagcgtaaccaccccattattcaattatctcccagtgggtacttcccatgacatgggactggaggaactacagttcaagatgagatttgggtggggacacagccaaaccatattagtggtaaaaactggattattgtgtattaatggagaggatcaattacacaaagaacrtaaaaatatgtttgacacaaagagagttgatttttccaggaaaattaaagaatttagagacaaactggggagatggaaaattaaacaaaaaattctaatgctctttggggagtatcttctgaattatttttatattgcagagagtttgtaaacagataggcctatttattataattattaaaattaataaccaatttattaatagtaaaattttaaacgtaaatattcttacacccttgtgtttaatttacaaattgtatcctacttataaatctagtaatttttgtccaaaaataagaaatatgatattcacttgttctttgattaatcttaaattaacttaagcttaatagttaaagtcttctaaacaattaaatacgccggccgggcgcggtggctcacgcctgtaatcccagcactttgggaggtcgaggtgggtggatcacgagatcaggagatcgagacaatcctggctaacacggtgaaaccctgtctctactaaatatacaaaaaattagccgggcgtagtggcgggcgcctatattcccagctactcaggaagctgaggcaggaaaatggcgtgaacccagcgtgcggagcttgcagtgagctgagattgtgccactgcactccagcctgggcaacagggcgagactctgtctcaaaaaaaaaaaaaaaaaagaaaagaaaaaacaattaaatacaacttacaaacataattatgttcttttaaacatttttaatgcctgactggacagatttacaaaacaaaatcttctaaactcttaagaaactcttgcaaatcaaacttataaacatagtgagccagtttttattttctttttcttttttttattttttctatagacagggtcttgctatgtttcccaggctgacctcaaactcctgggctcgagcgatcctcctgcctcagactgctgagtagatgcgattacaggcacacacaccatacttatttcaggtcagtttttcttaaacattcaaatactgttttaaaatttaatcaaattatcttatactttatgaattaaaattgcaggtctaataccaatgatgtatttcaaattgaaatcccaaaattgatatatcagagcttcaaatgtatattgtttctaccccttatttattatgtagattatcctgattataaaacttattaataaacttaacacaaaatattaataccacaggtttgttttccttcaccatttctctgcttatattaatataatcttagaactgtaaagccacttaagtagagaggacagattcttatcacttggaacagcactgataagactgggatgaagtttcaggactacagtgaaattgcttattggtcagagattgagtgggatgtgggcatgactgaccctaccaaagcatgggtgaatatactgaaccaattccatcaaccagaaacccaaagccacgcttttcaactgggatttagtcttcaaccagtgcatcgtgtttctattttatccactttttaatcaaacccttttcacctctttattacctgagttgggtagatgtgcccctacccatattgtaaccaatttccttcatcatttgtttggactctaataacctctctatggtctgattggatactatgtgttactgtttgcttgttatttggttctcatccacaattctgctatcattttattcacaaggatggacatttcatctgaccaaggcatgtcaggaaagacttacaggaagaaataatgtcaaagccaagatctgaaagattcatccatctatttttaaaatatttattgagtaattaacatatgcaagtactgatttggtatctactgagtagctaacatattcagatactagtagtctagtggtgaacgcaacagattaaatggctgccctcataaagcttatcttttggtggaggaaggcaacaagtaactaatacggtataaatggggggatgacatgtgagcagtaacctgaatgtcaaacaacaggggaaggtgtaagaagataaaggaagtcactaaaaaggatgacatagatgagtggttttcaactctgtcaagctcaacacccctttataatagtaataaatattttgtaatacccctcttttgttaccctgaaattaaattcacagataatatatttactcaggtgcataattttttaaaagaatgtacayaatggcctgaccataatagaaacaattcaaatagaataaaacctatgcattttttatccatatatgtccagtcacaaaaacaactactgtaggtatttcagaggagagttaatgtagagaattggttacaaagattttggaaaggctggaagagcaaatcgatgaaggtagggttttccaggattagtaactatagggaatgactacccccgagaactggagaagcaaaaacagaaatggtgttactcagagtcgctggtagccaggctgtggctgccatccttcatagcataagatccaggatgaaccagaagccagtgtctcctactggcagaccctcaagtgaggcaagatgggaaggaatctaggagctggaacttggaggtttccagccccagaggcagaaggcagagcttagaagaagtgtgcattgccaagagatcacagtgtcaatttgcaatttttagacacaactacatttgaagatacaatgaagaagtcagatgcttgaatctacttttaaataagttgagatttagtaggaataagacaatgttccactaaatgtagacactttatttatatgatgtttagaaatagaaggctaaataagtatattcacctctatgtatagtcatcacagatacagtgaccaccacacacctatatacaggtggtgtgatgttgtgatgttgattgagctgctgtcactggcattgccattgctgacgagattctccaggtggttgagtcaacatttcacagtaaaaggtctaaacacactattagttgcattgctggaaaatttagtgtatactaaaaccacaccaaaaagcttcgtgcttatatgcaaaatgaagttaggtttgggtttcaaatcattataaattttttttttacctgtatgaatgtccattaggatgttcaaaactggggctggactcgagttttggaggacatctaatttttcactcctttgtcttctaaatgtcatttgcacgttgccaccacatcccactcccacctctcattattatgacaactaaaactgtctccacagattttcggtccccaaaaaaagaggcagcagtgattctgaaaagaccatttttcacatggaaaattattatcgtggctgggcgtggtggttcacgcctgtaatcccagcactttgggaagccgatgcaggtgggtcacctgaggtcagaagttctagaccagcctggccaacatagtgaaacccagtctctattaaaaatacaataattacctggatgtggtggtggacgtctgtaatctcagtaacttgggaggctgaggcaggagaatcacttgaacccgggaggcggaggttgcagtgagccaagatcacgccactgaattccagcctgggtgacagagctagactccatctcaaaaaaaaaaaagaaaacaaaaacaaacaaacaaacaaaaaaacagaaaagaaaagaaaattattaccatctgtgaagtgaaaagcaggttaggaaataatatttcagaataattccctgtcattattttgaaaagtgtttattcatacatacaagagaaaggctggcagttgtcttagtccatccctggctgctgtaagaaaataccatacactaggtgacttataaacaacatacatgtatttctcatcgtttgagaagctgagaagtcccagatcaaggtgccagcagatttggtgtctggtgagggccctcttcctggttcacagacagctcttctcactgtgtctcaggtggtagaagggccaagacagctctccgaggtctcttttataagggcacaaaagccaattgtgcaagctccacctcacgacctgatcacctcccatataccatcacctgggggttaggatgtcaacatgtggatttggggggagcataaacattcagtccattatagtagtgtataagccaaagtgtgaacattggcatctatgatgtagagatttgaggaatgatttttttccctttatctgtatttttaaaattttctacttgagaaacttttaagttgattcaaggaaaaaaaaaatctatcgtaggtcaggccagayaggttcagtgaggatcctggttccttggacctgtcatacccgaaatctatcaacaggcgctaactgcttgacacaagctcctgaaacaagcatttactcagacgaactcccagcaatgccaccctccttcctgcacataaacccctcttggtccttgctcttcttggggatgatgaacagggtatttcctttcttggaaaagtgctgtgggtctgaagcaagctgtgccgcatttggggctttgtagcacagttttccttaagtataggaaccctcctaaactcagcactttgtgatgtagggatatttctccctcatgcctgcaccatacgtctcagctataaactcccaactggaagactcagtctgaggtttggataaccactccccacccataggccaagayaaatgccccaccagcaagctgcagagagataagggaagttgcttgctgggtgcttgtggcaggcctggcacttcragccctgccaagaaaaaacagggaaggatggtaggacaggaacmcagcatgaagtcattggcagggggtccctgtatatttccaaatgactgcccattaggatttaacctaatacactgtctccaagccagccgccagcctccaagacctctgccctgcacaggcccttatgtttggaccaacaggcagggtgtggttgtacctgaaacacacatcgcctaagcctgaatgcctgggccaagactagggatagcttccagatgtgggctccacatctgggccagccgtcaggagactgcttatttgaacaaagactgtaagtactcaaagagccccaaggtccggagaaggctgccaagacctggcgcacagacgagtacagaacagacctcaatttaaggttccaggagagaaagaaagctgtgctttgtggtcctggattgatacccacgaagccaggtactctattcacacaggatgggcaacagctccacccacagggctgaaatgcgaggcttagcctctaggataggcagaattccggactgaggatgggcttctattttcagcaacctgtctcttgacccttccccgctttccatatcgtctcctaattgatattctctggaaatattttagaaatacagaattttgcaactttacagtttggtgggcccttttagcccgtcatcccccaccagacacccattgttttacacagagccatgtgactcgagaattttccccactggataaggagaaacaaacaaatagagccactggcagtcgtctttggaagaggccaacaagattaccgtgacatgggggcagagtaccctacactcccgggaaagggcaaacgtacttctctgctgagtcgcgacaggctggctaggccccctgcccccccarattcatatattaaagttctagctggcagtacctcatgatgtgactgcatttggaagtggagattttaaagagtcaattaagttaaaatgaggttgtcagaatgggccctaatctaatgtgactatgtccttataagcagaagagataggacacagatacacacagagaggcgaccacgcgaagacaggcagaaggcggcatctacaagctgaggaggggggcctcagaagaacccattcctgccaacaccttgatctcagacatctagcctccagaaccagcctccaggaaatacatttccattgcttaagctgccagtctgtagtaatttgttatgacaggccgagcggactaacacgagagagatgcttggggtgtgctggggaggcgggtgagctgcttggcttgtaaaggccctgggggccaggctggttgggaggccagcgtggcccagcgaggagccctgggatggatctgagcccaaggatgtttgtcattttttttttcagttttgtgctttcattagcctcaaactatgaataaagtcctattaaatgtcactgcctgacctctgcattgctgtgggacataaaggagagggtccttggctgggcatggtggctcatgcctgtaatcctagcactttgggaggcctaggctggtgaatcacctgagatcaggagttcgagactagcctggccaacatggtgaaacccagtctctactaaaaataaaaaaaatagctgggtgtggtggtgggggcctgtagtcccagctacctgggaggctgaggcatgagaatcagttgaaccttggaggcggaggttgcagtgagctgggatcgagccactgtactccagcctgggtgacagagtgagactccatctaaaaaaaaaaaaaaaaaaaaagaaaagaaaaagaaaaaaaaagttaaagaggagaaggtccttgctgaggatggagtagtcaagggagaaccaggtcccttcctctgggcacagaggaggacagttttgggacaggatgggaacctttgagtacagacccaggactcagggagggacccacccatcgcaggggcagcattcctggggttttccagaacagccagtgggcagttggaggagtaacagctttcttcagggaagatggtgcaggcttgttctattatagtttggataacacatagcacaggaatttcactagctatgttaccttagggaagttacttaaactctctggtcctgtttttgagtataaaataggataattatcccttcatagagttgttataagcattaaatgagacgacgtatagaaaagatttagcactttctcttattcaccaaatatttctaagcacctactgtgtgccaggtaccattttgtgctgggaggctgcaatagaaaacaagagagaaaatgtccctgtcctcacaacttatattgttagagatggagaaacgatgaaggaaataaaagtggaaagtggttctagaaggaagaggcgggctgctgggtcaaagactgttgcaaagtcaacataaggagaagacagatccatgagcaaatgccacatgtcctctccttcatggggtgtggctttgggtttgtgtgaggtgggacagattgctgagcccctgcatgaaccagaccctagaaaggcgatgcaccagggagaagaggctggaaaaatcctgctcattggcccagggaaataatgagcaagctgatgtgtgcccaggatcctgagtgaggaaaaataaatctcctgtttaaaaataaaagaagtttggcagttcctcggaaagttaaataagaattaccataagacccagcaattccactacgaggtgtgcactccaatggctggagggagggactcaagcagatacatgtacaccagggttcgcagcagcattcatagcagctatttacaagggcccaaaggtggaaacaacccagatgtccatcagcagctgaatggataaacaaaacatggtacatatatttcgtggaatattgccgaattttcaaaaggaatgaaattctgaggccgggcgcggtggctcacgcctgtaatctcagcactttgggaggctgaggagtggggatcccttgagtacaagagtgagacgcatcatccacatgcatccttcctttctgagggaggtcgaatggatctgcttcggtaggacgtagtttgtaatttaccgagctgtgctcagtgcagtcgaaagcacgtgcagtgcgctcaagaccccctcgcactcggggcacacctcctgccactgggccgtgctgccccctctggccggtccgcacactgcagcccaaggcgagacctcccgggcggtaggcgggaaggggcagggagggcgcagaattctgaggcctggtagtattgtttttctgacataagcccactcctaattccgttccctctgaaatagatttgtgagatatttacagtgctcctgttcccatgaaaccaagctcaacaaaaagaaaaggagaaggcagccaatccaaggagctgcagcgccctccgtcacctggagcaggtgcttggtcaggacggcacrcagcacagttctgggctcccagagcccatgggtttgcagaggcccagggtatactctctccagaacaccccttttcgaaatccaggagcatacagaaagagactaacatgttccactacatttttaaaccttttgcatgaaaatgaaaaaactactatatgctaaatttttaaatgtcaaatgaaaaaaaaatttttgtaattcatataaaaaacaaggcctaatcttcctaatatataaagagctcccagaaaaaggaagaaaagaaaaagaaataacccaaaagaaaatctgggccacattcacaaaaagcaaacactgaaatattattttcacccacaaaactgggtgatttttaaaaacccacagaaggaaacgctaaacagggaagcatcccttggaagccacttgcttgatggcccccacattgaatcgcagaacaattctcaagaattcacttttcactttccccacaaatgtccttactactaaatgtgaggagattcacaaatatttctagagaaaattatttccatttaaataaacagaagaaaaaatagataccattcctagattttaaaaaatgttattaaaggataaactgtttgacggtaagaccattttaactctgtatttcaatgcttatttagcttagtacttagaccagtgatattaattagttttggatggttgtgataaatggatggatggatggatggatggatagacagacagatagattgatagattgtgatgcactaatgaaaaaaaggtggaaaagaagggatggagggagaaaagaaagaagggaagacaaaggacagaaagaagacaggggaattcttaggttggttggatggataaatggaagtaagtttgggatggaagaaaggacggttggttgactgactggctggctggatgtgacggaataatgagtaggtggatgaaatgatagattaatgggtggaatggatgatggaaagctgaaaaattgataatgaagtataacaagactctcatcaagtaatgtggcttgtctcggtttagggacagaagcattgatgatataattctcttcttttctagtaaaaatgggaaaattcataaatttttttaactagtttcatttacagctgccaagacatacagggctctcaactgagatcctgcctcttgagcaagaggaaggtgaaatgaggtgcaagggttagcatctttactttacaggtgaggtaactaactcaaccttccttttgaataataaatatccaagctattacagactttataaaataccatgcatttaaaataaaattgtaggccatagaaatgaacaaaagaagggaaagaacagggtcattaaagttattctatgagctaggacaggtcaccccaactgtggttatggccaaggctaaattacagagtgcaatgccatctgccccagtgttctcttcctgtcactctcaaaggctttttattccaatttattttaggagtgccaaaaggtatgtttctaattctatttctctccagttctttttatagtactcaagtctgggcaaatatcagtaacataaacgtgtgtcctcgtttttgtattttaagtcagtgataagttgaagtaccctggatttcctgcttctttggaattcatcacctgctgttttcagagccagctgcacctgtgtggttttcggagcacaggtccacctgctggactgcctgctaggccattagcaaagccagtggccaaatcacgcacttgggcgtttttagattctgtcactttagtgattgtgaaaagctccaggctgcctgcaccccctcccaatgtttgccagagaactgggagctggggacaggggttcatttggaaaatatcagtaagaaataggaagttctaaagaacttattatctatgaggaagacaaccaattattgccctgagtttattggggtctttctctcttcacctgtaaaaaagtgcatttgcccaaaaggtattgaattaagggggtatagtagatgctgccagattccaatataccttcccttgtccttcttcttcagtgctgacaggctcccatggtagctgccagcacatggcctgaggactttctcttgccctggagctccctttgctacctgtgccactgcctgaagtgctagggagttgatgcccctgggaacagccacccaacgatgattgacaattggtatatatatataccccagctcccttgcttttcaggtaaaaactccgatgtgtgtgttctacactggcttctagagtttcccaagtggaattaagcttcagtcacccacagtggtagctgaatggataacacaggctttactggctgccttctcttcctgtctcacttccccactcccctgccagcatctcctggggtcttatctttcaaataaacgacatgatctggaatcttgtcttagagtctgattcaaagggaacccaaagtcaagcatcctctatgaatgggatattgctggggagatagcagaagacatctgggagattcccttgccaaaccagaaattatggctatctctcgagcctgagcagtctacacagtttagagttcctctgatgcagtttagggaccctgtggatgccacgtacnaccttcagccctgggagggagggctgaggtggaccccagccagaggtgttcagaacacagtgagccctgtagacaaagatcaggggagtgtcgggacagttggacgacagaaggacccattgtgttctcctgccatcgccatccggtgtacattctcctcaccagtcccttttaactgtgagataggaggtggagggagaaaaatgactgggaaaataggagccttcctgcattctactcattccttttatactcaacttatttttgttctgtaaagtacactttttagtgtttctttcagggaggacctgctaggagtaaactcacaatttttatttgattaaagatttatttacaggccaagcacggtggctcacacctgtaatcctaacacatttgggaagctgaggagggcagatcacctgaggtcaggagttcaagacctctggccaacatggtgaaaccccatctccactgaaaatacaaaaattagctgagcatggtggcctctgactgtaatcccagctactcaggaggctgaggcaggagaatcgcttgaacccaggaggtggaggctgcagtgagccaagattgcaccactgcagtccagcctgggtgacagagtgaaactccatctaaaaaaaaaaaaaaaaaaaaagagagagagagagagatttctttacagttctcccttggtatctgcagaatattccaaaactccctgcagataccaaaatctacagatgttataatgcattatataaaatggcattgtatttgaatataacctatgcatatcctcctttttatatgtgttgttcttaatcagtatttttttctgttgtatcgttgtgtcttttttttcttaatattctcaatccatggttgattgaatctatggatgtggaacctgcaaatacagaggatggactgtattttgcccttaaagttgaaaaatagtttaactaggttttgaagtctacactggtagttattttctgttagcttgtgccttgtcttctgacttctcttgtagatactgaggaggctgttgttaatctagcaatgtcattcttttgtagataagctctctccctctctctctgtctctctctctcatttcttgatccagataaatttaatcccctttttccctctctgctattctacagttttattttcatgtgtccagctgtgcctttatttttatttcagggttctttgctgcttgaacctgtggaatcatatctcctatcaattcttttaaaaatttcagccattgtctctttgagaattgccatcatcttatttttttctattctctcttaaaattcttattagggatatgatagctcttgttattctacccccatgtctcttaagtttcttttaatattccctatctccccttggctccatcttccaatttacaaactctttctttagctgtgtctaagcagctgcttaacctcatccactgagtgtttagtttaaacagtcctatttttcatttctagaggtcctatttttcatttctagaggttctattttgttttttgtttttcaaatccacctggtcatagttgtcctctttagttagcctctcttctatggtttttactttaagcatattatattatactctttcaattgagcattttattatctgaaagctaccatgtttgggatgaatgcttactttcactcatgatggaatatatactttagtgtttcataattttttattataaaattctctttcagagatggtcttgttttattctgttttgtcttctgtgggaattctgtgcagcttggatcttagacatgtcccttcatagtggtttcaattttgctkttgccaggtgtcttggagatagttaaggcaattaaaaagtcaccacttctgtgctgccacaggtcactttccatcagctgagtcttggaacctttcctcactacttgcatggcaccttgcacacatctccatggcacctcacatcacactctgttctgaagcttatatgtccctttcctctattattctgagagctccttaatattcctcaggtctatcacagagctcataaacatttgttgcatgaatgaacttggagaagccagccctcagagcctcagcttctttgaatgggatgttatatttcatccttacctcataagattgtcgggatatcatagactcttagggtcaaaaggtgctgtaattcaatccataggagggtcacattaaatgcttaattccctgcataagataattaactaaaaagccctcacaagctgtgaagggccagcagaggtaactgactgtgcttctccactgcacctggcagtggttcactataacattactgtctgtctttgtgctctgtgagtcgggaatagttccaatggaaaagatccatcatgcagcaacaatttcaaacttttctgagaccagaacaaagctgcacctgaagctgattcccttgggcatactttgggtttaggatccttcaaaatcaaatggcagtgaccaagaaagcagctgtgtccactttaaatgtccactatctgttcctcactttccgaacttgaccaaacactctttgaggagagtgaccacaatatatatgtatttgtatattcctatggtcaagcaggaagcacagtactaaacagtaagtttgaattctgtctgacccattgaatttctttctttctttctttctttttttgttttttttgagatggatcctcactctgtcacccaggctggtcggcaatggcacaatcttggttcactgcaacctccacctcctgggttcaagcgattctcgtgcctcagcctcccaagtaactgggattacaggcgcccaccacayccggctattttttgtattttcagtagagaccgggtttcaacatgttggccaggctggtcttgaactcctgacctcaagcgatctgcccgcgtcggcctcccaaagtgctgggattacaggtgtgagccactgtgcccagcctgaatttcaagttaaagctagagttgcatttgatgctcaacactctaaataaaaaatatatgctacctcacaaaactagaaattcttgataatagtaaagccatttttggtttggkstwtaytttttttttttttttraytcaagctttcctttggtgggaaaaaaaaggatggggtttgctatgggtttcagcggctccaaatagctgtcttcccctgccccctagtggcttcatgacaaactgtgagamccttcgcgtcgtttcttctcaattttcttcattactcctattcttactgtttttattattgcttgtgaaaaagactttcttaaaattatgcaacctaaaaattccccttgcttaacatgaaataaatcttctgtactttttccagaaaatatgcgtgcagggccaggcgcagtggctcacacctgtaatcccagcactttgggaggccaagtcgggggatcacttgaggtcaggagtttgagaccagcctggccaacaaggtgaaaccccgtctctactgaaaatacaaaaagtagccgggcgtggtggcatgtgcctgtaatcccagctactcgggaggctgaggcaggagaatcgctggaacccgggaggcggaggttgcagtgagccaagatcacgccactgtactccagcctgggcaacagagcaagactccatctcaaaaaaagaaaaaaaaaaaaagagagcgagaaaaagaaaaaggatatatgtgtacagtcagaggcaccgtcctagacatagagaacacaggagtttagaagcaattccctctcattcctcatcggtggccatcgtagaygtttcccttcatagaggccaccaccctgggaggtcttgctccatggccccagctgacccaacatgaaacgtccacacctttcccaggcgcattctactaccagcacctcccaaattagacctgagccagccttcacatcattcccagccccagcctcctgtcccggccaagaacagcccctttcttccatgtgccttggctcctgggtcccacctcctgcctgtgctctctgcataaacaccattggtttggaataacccactagaattggatcctagacatgaacccagcgtttgttcacagtgtgtgaccaccgctaacaccaaccccagtgatttttggtgaagcacagaccaggcaaaccctgtctttatctgggccacttaacatacttcacaaaattcagtaagcagataaattaacagagattacagtcattatgagatttaaacttgtgtcctcgaagatcaggtagagccgccccatgaaccaagttgctaagaattcataatatatgatctattgagtttctctgcaccagcaagcttaactagaaaatgagttttttaaatgacacctttacaactgcatcaagaaaacatcaaatacaaatacctgggaataaatctaacaaaatatgtctaagacccctaccctgaaaatacaaaacatcattgaaagaaattaaagatctaagtaaacagaggaatttgcaacgttcatggaatgaaagcctcaaaagtataaaaatgtcaattattccaaaatatatttatagatttaaagtaattcccatcaaaatgccagatttttttaaattggcaagctgattctaaaaattcatggggaaattttttaaaaattacttaaagaagaacgctaaaggagttacattatcagatatcaaagcttattacataattccatgtctgggtatataccccacaacattgaaagcaaggacttaaacagatacttgtacacccatgttcacaccagcattatttgcaatagcaaaaggtggaagcaaccccagtgtctgtagacaaaatgtggtgtacacatgcagtgaaatattatccagccttagaagggaaaaaattctgacacctgctaccacacggatgaatcttgacgacattatggtaattgaactatgccagtcactaaaggacaaatgtcatatgattctccttatatgaggtacctagactagtcaagcttatcaagacagaaagtaggatggtgattgccagaggcttaggggagagataatggagagtgtttgtttaacggatacagagtttcagtttggaaagataaaaagagttctagagatggagggtggtgatggttgcccaatgatgcaaatacacttactgacattgaactgtatgcataaaaatggttacaatggttaattttgttatatgcattctaccacaattttttttaaaaaggacttgttataaaactacagcaattaagacagtgtaataaaggcataagaacaaataaaccaatggaacaacatagaaagtctagacacaggcttacacacaaggtcatctaattgatgacagtagtgacaatgcagtagaatgaggaaaacctggccatttaaaaaaatgatgttgggtcaattggttaaccttatgcagacaaaatatgtcttaacacctaatgcacaccacacacagaaatcaattctgtgttgtagatctaaatggaaaagatcaaatactaagccacctagaagaaaacatagggcaatatctcaaagcactgaccttaaggaaacagattggtaaactagacttaattgaaataaaaatatttttgtttatcagaagatcacattaagatgaaagggcaagctttggagtgagagaagatatgtgtaatacacacactcaacaatgtataaaatgccctgcaaatcaataagaaaaagacagctctcaagagatcgagaccatcctggccaacacaatgaaacaccatctgtactaaaaatagaaaaattagctgggtgtggtggtgcatgcctatagtcccagctactcaggaggctgaggcaggagaatcgcttgaacctgggaggtggaggttgcagtgagccgagatcgtgccaccacactccagcctgggcaacagagcgagacgccatctcaaaaataaaaaacaaaaaaaaccaaaacaactcaacagaaaagtggtcaaaagacttgaacagggaccgcacgtgagaatataccccaatgaccaataaacacatccaaagatggtcaacatcaaaattaaactacaaaaagacatggcaacaaaacacaacacagagtaccacaggttgatgagattttggagcaactaaaactctaatgtattggtgagagcataactcggtacagatagtgtttatctatgtctcctatagctgagagtatgcatgctttatggcctagaaattccactcctgggtaacaatccaacagaaattcagtatgaatgtgaatagcaatggcattcataaaaatcccaaagcagaaattacccaaatgtccattaacagtagaatggataaatatatggttgtatatccacagaatgaaatactatacaacaatgaaaaacacaaactacttaacacattacatacgggtggatctcacaaaaaaaaaaaaatgtcaaataaaagaaaggcaaataagaaaagaagatgatcctatttatatagtccaaaacaggcaagagtagtctgtagtgttggcagtgaggaggatagtggtcccttgtatgggtggtgactagaggagacatgaaggaggcttctggacatatagtaatggtgcgggctacacaagtgtgtgaacttcatgaaaattcttactggcaaacgaataatttgtgcactgttccttatgtgtgttaatgttcaatacaaagcttacttttaaaaggtatatattctatataattcagcccaaagaccacattttacttaatggagaaacactatacgtagcctcactaataataataatagaagaaagacaaggtaggccacatgtccatattcaatactgcattggggataaccaccaataaatcaaataagagaaagcaattagaggaataataactggaaactgaaaggtaaaagtatctctgtttgttgatgacatgactatatatctgggaaacaaaaaattaatggaaaaactactacgagcaataaaggaattcattacaaataacagaaacttagcatccggaaaacaatagcttttatatatttaaacaatgatcaatttataatgtcaaaagtattttaagtaaaatagcttgacataaacataacgtgaaatgtgtaaaacccatatgagaagactattatatactcctgaagatatgaaagtacatttgaggaaaagacacgtatttttttgaatagactcactatcttaaaaatgttgactctccctaatttatgtataaaatcaatgtggtattggggtttgtttttgttttttcctggagctagccaagttaattataaagatcatatggaagaaatatcaggcaggaatacctaggaaaatcccgtggaaaaaaagagtaatatgtgtatgttggaaaggggaggttaccagatattaaaacataatgtaaaatccttataattaaaacaatgttgtattggcatatgaatagtccaattaaataaaatcaaaaatccagaaatagactaaactacacaaggaaatataccatactatgaaggtaatgtctcaaatcagtaaagaaagaaaacaatttttaataaatgatgtttgaacaactgaataactatatgggaaaagatacaattgaatctgcttatcacactatactacaggataaataccagagtaagccacacaaatcccagaggaaaacatgggtaagttactctactaccaggaagcagccacatgtctcaaaatccagaattagtgaaagaaagacatttataaacttgactatattaaaaaaaacttttacatggcaaaaaataacataagcatggacattaacagaataataaaagaatataaacaactctatgccccaaatttgataacttggatgaaatagaccaattccgtgaaagacacaatctaccaaaactcatacaaagagaaacagataatctgaataggcctatatctattaaagaaattgtacagtaattaaggatgttccaaaacgaaaagcaccaagcccagacggatttgctggtgaattctaccaaacatttaaggaagaaattacaccaattccttgcaatctcttccagaaaatagaagcggagggaacacttcctaattcattctgaggccagcattaccagcatactatagccagacaaatattacaagaagagaaaactacagaccaatgtttctcatgaatgtagatgcaataattctcagcaaaatattaacaaatcaaatccaacaatgtataaaaagaattatacaccacaattaagtaggatttattctagttatgcaaagctggttcaacatttgaaaatcaattaatatatcacactaacagcctaaaaaagaaaatcatataatcacatcaatagatgcagaaaagccatttgacaaatccaacatccattcatgataaaaactcacaggaaactagaaatagagggaaactttctccatttgataaagaacatctacaaaaacctacagttaaaatcatacttgatgagaaactagaagctctcccactaagatcagcaacaaagcaaggatgtctgccttccctacctctaaccaacatcatattggaagtcctaaataatgcaataagacaagaaaaggatatacaagatatgcagattggaaaggaggaaataaaaccatctttgcttgcaaatgacatgttcatctatatagaaaatcccaaagaactgataataaaactccaggaactaataagtcattacagcaagttttcaggatacaaggttagtatacaaaagtctatcgctttcctatataccagcaattaacaagtgaaatctgaaattaaaaacacaataccatttacattagcacccccaaaattaaatatttaggtataaatctaacaaagtatgcacaaaacctataagagaaacactacaaaactctaatgaaataaatcaaaggatagctaaatgaatggagatatattccatgtgcataaatacaaagatttagaattgttaaaatgtcagttctttgcaccgttatttataggtccaatgcaattccaatcaaaattacagaaaattatgttgtggctatcaacaaactgattcaaaagtttatatggaaaggtaaaagacctcaaatagccaatagaatactgaagaaaaacaaagtcagagggcactacccagcttcaagacctacaacaaagctacagtaatcactacaaggtggtattggtaaaagaagagacaaatcaatcaatggaaaagaatagagtctagaaatagacctatataaatctagtcagctaatctttgacaaaggagtaagagaaattcaatgggataaaaatagccttttcaacaaataatactagaacaactggatattcacatgccaaaaaaaaaaaaaaaaaagaatttagacattgactttacgcctttcactaaaactaattcaaaatgcatcatagacctaaatacaaaatgcaaaaatataaagagaaaaatatagaagaaaatctaggtgaacttgggcttggtgattacctttcagcttcaacaccaaaagcataagctataggagaaaattttgataaggtggactttattaaaatttaaaacttctgtgaaagacactgtcaagagaatgagaagacaagccacagcctgggagaaaatatttgtaaaataaataaatataggacttatacccaacatataccaaaaaaagaaaacttcttaaaactcaacaataagaaaacaaacaacaaaataagtgggcatctcaccaaagaagatatagatggcaaataaacatatgaaaatatgcataatatcatatagaattagacaatagcaaattaaaataagatactactacctatctattagaatagctaaaaccaaaaacactgacagcatcaaatgctgatgagaatgtgaagacacaggagccctcattcactgctggtgacgatgcaaaagggtccagccactttggaagacagttagtttcttacaaagctaaacatattcttacaatacgatctggcaatcatgctccttggtatttatccaaatgagtttaaaacttatagccacacaaaaacctgcacatggatatttataggagttttcttcataatggccagaatgtggaagcagcctagatatccctcagtaggtgaatagataagtaaatgtgatacattacatacaatggaatattattcagaaataaaattaatgagctatcaagctacgaaaagacatgcaggaagcttaattgcatattgctaagggaaggaaaccagtcagaaaatatttccgacaaatgtcatctatatgacatcctggaaaatgcaaaactatagagactgtaaaaatatcagtggtttccagagagttggggcaaggaagggaggaagggagcgatgaacagttggagcccaggacgggtttagggcaatgaaacgattccacacgacatgataacagtggatacatgacattttgcgtttgtcaaaatgcatagaattgttcaagacaaggagtgaaccctaatgtaaactacagatttcagttgataattatgtcaatattggctcctgaactgtaacacgtgtacaatttgtaagatgctgataataagggaagctgtgtgtagggagaagagagggtatttgggaactctgtactttctgggcaattttttctgtaaacctaaaactgttcttaaaaatgaagtctattaattaaaaagaacaacatagcgaagtcaaaagactggaaaaaaatatttgcaatttgtattacagacaaaagactaatttcctgaatgtataaagcaccagaaaattgaagggccaacaacttgaatgaaaaaactgataaaagacacaacagataattcaccaaaaaagaatgcaaatgacccttaaaggtatgaaaaaatatgaaactccactcataagagaaaggcaaattaaagccatactacggtgccatttctcacctatcagatcggcaaatattcacagctatgataagcgttctgtgatcagggtggaggaaacaggcaccttcgtatattgttgttaagaatgcgaaacagcaggccgggcgtggtggctcacgcctgtaatcccagcactttgggaggccgaggcaggcggatcacgaggtcaggagatcgagaccatcctggctaacaaggtgaaaccccgtctctactaaaattacaaaaaattagccgggcatggtggcaggcgcctgtagtcccagctactctgaaggctgaggcaggagaaaggcgtgaacctgggaggcggagcttgcagtgagtggagatcgtgccactgcactccagcctgggcgacagagcaagactccatctcaaaaaaaaaaaaaaaaaaaaaaaaagaatgcaaaacagcacgacctttatgaaagggaatttggcaatatctacaaaaattgcatatgctttaccctttgactcggtaaattcacttctagaaatccatcccaaggaaatattgggaaaaaaaaaaaaaaagcaaaatgcccaggcacggtgactcacacctgtaatcccagaactttgggaggctgaggtgggaggattgcttgactccaggagttcaagaccagcctgggcaacatattgagaccccgtctctacaaaaatttaaaaattagctgggtgtggtggcacatacctgtagtcccagctacttgggaggctgaggtgggaggttcccttgagcccaggacctnccaggctgcagtgagccatgattctgccaccgcactccagcctgggcaacagggggagaccctgcctcaaaaaaaggaaaagaaaagaattaaagaaaactaataaaaatggttagcaagaacagaaactacactgcttgagattaccttcttataggtttaactttgggccatgtaactaaaaaaattactaacgagcatccctttttcctggttccaggtcactctgcacaaggctgcaagaaacatccttacacatatgtccttacatgctgacgctttcatttctacaggatggaaccctaagagaggaattgttgaagaagtcatacatttttaaaattatggaaattgtcaagcatgcagaaatagaaagatatgtataatgaacctaatgtatattaatcagctggcagagtctcacagagaaagaatggctttggtggcctttagaggcagtattttgactgtacatacttggcggaatatgccctcaggacaagaaagaacagcaaaataatttaaaactggccacaggagccaaaacttaaaagggctcccactgatgtgagctggaacaatttgagtatttaaaaaaacaataaatgcaatgtattgaaacacataaaatacacaaaatccatgaattaacaattgcactaaaaaaaattattggtcactgttggagaacactagggcatcagttcattattctgaaaattgatacagaaaaagaagccaacatttattctgcctttcctgaacaaatcatatttcagggcaaccaaacagttcataaggcagtttgcttttatccaagaattccagctaattatttcagaaggaatgacagagctagaaatcgccattttgtaacatctctcggaataatggacctaggctgcattatgagcagagggtcagagcactcggtgaaaagttgataggaattttatcttggactgatcagactgacatactctgaagctgctgaccaatatttggtatcccccatgtgcatgtgctaattacctatctatatgaacatataggccataggaatatgtatatattggaaagtgtagaaaacaacactaggttaatatagatcaccgggagcggggagtttggatggttcaatcctatttatgtaaggcgacatgtgtttatgtgtgctaaaagcaaggcaagaaaggaggatcaccgaagctgttagggtcgtctttgctcagatcgttccacccctgagaagcctcccctcccatgctctccagcacagagctcacgccccttggccatgctgaatcatgaggtggtcttaccataggaggacaggacgccaatacacaggagagcttggtgcagtacgtgtgtgcaggattctgctacatagcctggttcaccgggacctggcaccacacataggccttgcagagaaggcaatcccagccagacccacggcagaggaagccagataggaaaatgggatgggattcgcactgcatcagcccagccgaggtcaaccacagatgcctcttcagggtctactggaaactgtccatgatataaaggtgcattctcatcacacttgccatcagctgttgagtgcaccaaaagtctctcattctaaggagggctagagatgaaaagcttcgggtatcccatcatgcagagatggtacaaggttcagatctacttacacctgccttcagaacttaatgatttggtaagatgataaacaggtaagagcttcataaactgcagggcactctacaaatactggcacctctattataaaatgcctttaacttttaacttgatggaagaaattagtgtgactaagaatctggtgctttcctaacatgtcaatctctaaactcaaaacgctgtcattttagatagttctcactctgaaactggatttaaatgaataggaaatcaagcctgaaggggaatagtacatggggagaggagaccacggcaagggacctccatgctcctccgagacactgaaatgggaagtgattaacctttggatagtctgtggggtgatttggtatttggccatgccgctgaggctgaaaggttaatgaatttgctgcctgtggaagagccaggctgacgaggaagacgctgtctgctgagggagtggggaggagggtgtgctggcagtggggggcacctggagctcccccnaacccctgcctcatcccctaagtcacccacagggtccctcaaggcccctgcttggtgttctgccagaagcacctgctgggcccggccctgggcaacccccactcctgctggcggctgcagtgggtgcctcaggggctgctgtcctgccctgtcactgccttcgtccacagataaagaaattctgagaggaagcaactcctgtgccaggaatgaggcctatgctcaggccagctcctcggtgacactgtgacatcgagctgcgcagggccctgtcctccctctccacaggctgtagaggtgacagcattggtcggaacctactcttcttggaatcgccagtgccctggtttcagctttgtgttaaacagagtccttgggtcctttcttcagcaagagctggaaaaaaggactctccatttctcctctggtcctttacccactgtgatcttctaccctggcaggacaacagactcactagaggcttaaggaaatactcacgttggccccaccccatgccaatggaaccagggtctcgggtaaggccctggcatcaacattcttccgaattctgatccccagcagattctaaggtgcagctggggaaagccagcagccctgaccatgctcagtccctcagtgcccttggactctggggcagcctacaggtcccagagggcccactccagccacagtcacttcctcatgctgccttatcagccctgattggtccctgccagcccgtgatccagccccccctccactggggaaagagagctcccaccccagctctagatccagcatcgccccagccccacctctgtccctcccgtgctatggtcctggagcctcagcagacactgcctgcagtcaagacacagctgagccctgctactctccttggctcttccccgggcctctccctcctggctctgggtctccaccttaacatagaaatgcgtacctttccctcactcaggtaacttggactgcccagctcccaagtatcttcagcagtgctggctggaagaacacaaagactctcaagggtgggccctgcctcactccctctggcccatcggtgcccagcactcctactcatcccggtgtccatgtgtgctcccccaggatacttgacttttcatgcacctctgttccttctaaaatctgagaagcctcctccactatcttccttccaaatctcccaagtgtctggaggctgggccatgccaggagctgctgcgggctacacgagctctggccacactggccttctccagggaaaggttcaggtattaaggagttttatgccaggcccaagcatctccctggggatcagtgtggcactttcagcaagccccagccgtgctgcactccgagactctcctttttttttttccaccatcttccctgcaaatacttcagacctgtccaagaggattagagttgttggttggggcacttcctgtccagcttccttgctgacccccagaattgtctgcaggtccgcttcatccctgggctccaaggctctggtgtgtcaccactgttgacactcatgaatcagcccaagtcccaggaccaagtcagttcctgatgtggactaatcccaggtgagtccctaagatgtaactgatcaacttgggaatcaccgatccaagcgtaccatgaggtcactacaatggctgggcctctgagcaccccacagagctccctgtagttatttctgagaacactcagggcattgtcccaggagttccttggacaggacctgttatgggttgaattgtgtcttccaccaatccttatgttgaagtcctaacccccaggacctcagaatgtgattttatttggaaacagagttgctgcagatgtaattggttaagacgagttcacactgaggcagggtgggcctttcgtccaatacaactagtttccttattaaaaggtgtattagacagggttctccagagggacataactaataggatagatgtacgtatgaaagggagtttatcaaggagaactgactcacacgatcacaaggtaaagtcccacaataggccatctgcaagctgaggagccaggaagccagtggtggatcagtcctcaaaacctcaagaagccttcagtctgtggccaaaggcccgagagcccctggtaaaccactggtataagtccaagagtccaaaagctgaagaacttggagtctgaggttagagggcaggaagcatccagcatgggagaaaaatgaaggccggaagactcagcaggcctgctcttccatcctctcctgcctgctttattctagccttgctggcagctgattagacggctccacctagactgggggtgggtctttgtctcccagtccactgactcaaatgttaatctcctttggcaacaccctcacagacacacccaggaaaaatactttgcattcttcgatccaatcaagttgatattcaatgttaaccatcaccaaaggggaaactgggacagagataagcacactggggaatgccacatgaagatgaaggcacaggatgccagagatggccagcaacccccaagctgggggagagcgtggaacagatgcttcctcgaagcatcagaaggcgccaacactgccgataccttgctcttggacttctagctccagaaccatgaggccacctgtttctgttgtttaagccctgtgttcgtctgtcctcacacggctataaagaactacctgagactgggtaatttacaaagaaaagaggcttaattggcttgcagttccacaggctgcacaggaagcatgacagggaggcctcaggaaccttttaatcacggtggaaggcgaaggggaagcaggtacatctctctcacgtggccagagcaggcggaagagagtgaaaggggaggtgccacacacttttcaacaaccagatctcgtaagaactcactcactgtcaacaaaaacagcaccaagggggaaaaccaaccctgtgatccaaccaccacccgccaggcctctcctcggatactggggatcacagttccaaatgggatttgggtggggacgcagatccaaaccatatggagccctcagtctgtggttctgttagggcagcctgaacagaataatgcttgcccccatgccgctcccttccagtctctgcccagccaccccctccactcctcctgccacatggttctcaggagaccctcgtttacttgggcacagccttcctctgaccccactactaggttcccctttgcccttgatcctgagtgaacaggcctctaactcccaccacctggagactgagcttgacctcaaaggacttgactggaactgcaggggcgtgttagaagggaagcctgacccagacagccactccccaaacaactgcagctcctctcacagccaaagatgtctcctcctgggtgcccctgcctccctgtgggtcagggaccacccctcccatggtgaatgtccacaccctttagaattcagcccaagcccatgagtcccataagaggacagggtttcccacagcccgtctcaggcctcctgatctactttcccccaccaggcccggcctctcttcaggaaggctaggtgctcttccctgtaagtgccagggaactcatgtccgacacaatagtccaactccgtcctctcctggagtctcaaccactgtgtgtgaatgatacaaggtagggcattgccagtccacaccattatgaaaggatgcactgggttgaacagtgtccccaaaaagttcatgtcaaggcccagcgtggtggctcatgcctgtaatcccagcactttgggaggccgaggcagacagatcacctgaggtcagaaattcaagaccagcctggccaacacagcaaaaccctatctctactaaaaacacaaaaattagccaggcgtggtggtgggtgtctgttttcccagctactcggaaggctgaggcaggagaatcatttgaacccaggaggcagaggttgcagtgagctgagatcgtaccactgcactccagcctggacgacagagtgagactctttcaaaacaacaacaacaacaacaaaacccaaaaagttcatgtctacctagatcctgtgaatgtgaccttattcaggaaccaggattttacagatgtcattaaggtaaaatgaagtcatactcatgaattcatggttagggggggccccaaatccaatgtgactggtgtccttgtaagaagaggacactttggacacagagacccaaacacatggggaaggccatgtgacaacaaagacagggattgcatctgcaagccaaggaacaccaggactgccgggagccgccagcagctggagaggccaggaagggttctcctccagccttcagagggagtatggccctgccgactcctggagcgtagattccagactctagcattgagagagaatgaatcaatgttgctcgaagtctgatttgtggggcattgstacgkwtgytctgggmamctcrkgcrywwgycaktmmgcswkggctgtcyytttcacmgctttcctcccggcgtgagcttctgtgggttaggatgctttcatacgcacataaccaacccaactcaagtggctcaggcaacaaaggatctatcctacaccttgaattgcatgatgaaaatagatatgcatgcaggtaacaatgatgagtgtccatgagcatggggagatgtggggggcccaggcagtagggcagtacgtgtcagatgtcagcagtgcttacctggatgggggagaggagagctgtagagaaccagacagaagactgcctttcagcctaaacatgtgcattcaccttacttcatggctttcctggaacaaaatggctcttcacatttgtgaattggaagtgggttttgtgctggagtcagccccaaagaagacatacaaggtttagcgtcctttttgagacaaaaagcttcccatggaaccagtatattctaccaagatttcaaaactctctctttttgtttttttagacagagtctggctctgtcgcccaggctggagtgtggtggcacgatctcggctcactgcaacctctgactcccaggttcaagcaattctcctgcctcagcctcccaagttgctgggattacaggtgcccgccaccacacccagctaatttttgtatttttagtagagacaagatttcaccatcttggccaggatggtctcgatctcttgacctcgtgatccgaccgcctccgcctcccaaagtgctggggttacaggcgtgagccactgcgcagggactccaattcctttttaaatttatttcttcagcgttgtcactgagatctgtctgtccaggtggagaagcacctggagtgacagcatctgtcctcaggagcatactgcagagctataaacatgacgaactctcaggagtccaaagacaccaggtatcccaggctgggcgcacacatggatgttgttgcagtgagaaccaaagacttttgcttgaatttcctcctcctgggggacaagggccatagagtcctggatgcttagctcaaggccaataggcatgtgttatatgctaatcgatacacgcatttgtgacctgggagcatgctgttttgagcagctgcatgtctataggaaataataaagtgattcatttttatgttgcaaacttcagtatttgatataaattctatcaatatgcctttgccaccaagctcctgcctctaatatttaaccatcatctattgtagttgcaacaaactgaatcgattgagattgaaaaatcagatgtaaaaaaaaaagtagaaaaacatgtcctttgtggttaatattaatcttgcgattgatttttttcttttaaggaagtctgccaagaatagaggagacaattaggagaaaaagtgattcactgtatccacagcttcggaggtcaaaaggagacagagctggccttggtatttggcagagaggagagtcaagaggttgggccagcagccgcacagaaacacatcacatgagacctggagagggaggaggcaaagagcacggggcagtcaggaggacgggctgggcgccatgctctgcgggagggagggaggctctggcctccatgccttggctcccagtacagcaccttcctgttcctggattagcttcctggaccagacacaacactcaatgacctcttttagtcaaaaacctctccaagaccaggctattctcggcctgctgcacttctgcttaggctattccagaagtgacccctctatcagagccaagaaggctgtgtggcacctctgggtaagatctgtggggtcactcaccagagacccctggcacttagctcatcagaagaagatggctgagcctagaaggtgctgacaaaacaaaaaacaaaacaagcccccctactcccacaactttctcaggtcatcacaccctggaatgatcccaagcagccccatgccaccactccccaaccttctaggaacctcagtaaaggagaaatatgttattgatgtctccactccacagctgttgtctcccacgcacccgctatctgcctggcactgttggtcattttagggacactttagacaggtaagtttctactctcatgaagcttccaacctaatggggagattgtgaacaggcagataaatgagatcatttcggatattgatgaaggacaggaagaaattaaaatgcagtaatgtaatgtggggtgacttggaagggagggccttccaagtcagggtggtcaaagaagacccttcagttaccctgtggggaggcaacatctgagctgaggtcagaacagagaaggagctgacacaacactctcggaggaagcacagcagactgaagaagagcgactacactgggtctaaatggagaccagccaggctcgcgccgcaggaaggaagccggtgtaactagaccagtcactgtaactgggggtgactttgcctcccaggggatatctggcaatgtctgcagacagtgttgctgtcggcagtgtgggaggatgctagtggcagctagtaggtagaggctagagatggcactaactgtcccacaatgcacaggacagcacccaaccaaagaatgatctggactgaaatgtgcctggtgctgaggctgagaatcttggggccagagggtggagtgagggcaagagggcaaaagcccatggctgggaggtggacagatcacataagaccacgggggccctgatgaggagtttgggttgtattctaaaatgatggaaggccactggagacytcccctcgggaatctggcatgatgtgcattaacaatgatggctctgatgggaaatagatggctgtgggtgcataatggaccctcctacagaagtgcaaatgagaggtgatggtagcttacaggagctgtggagacagacagaagtggatggctgggatatgtctttttaaaaatgaggctgggcgtggtggctcacgcctgtaatcccagcactttgagaggccgaggtgggcgaatcacctgaggtcacgagttcgagaccagcctgaccaacatggagaaaccctgtctctactaaaaatacaaaattagccgggcatggtggtgcatgcctgtaatcccagctacttgggaggctgaggcaggagaactgcttgaatccgggaggcagaggttgcagtgagccgagatggcgccactgcactccagcctgggtgacagagcgagactccatctcagacacacacacagaggctgggcgcagtggctcatgtctataatcccagcactttgggaggccggggcaggcggatcacgagatcatgagttcgagacaagactagccaacatggtgaaaccctgtctctactaaaaacacaaaaattagctgggcatggtggcaggtgcctgtaatcccagctacttgcaaggctgaggcaggagaattgcttgaacccgggaggtagaggttgcagtgagccaagaccacaccactgcacttcagcctgggagacagagcaagactctgtcttaaaaaaaaaaaaaaaraaaagaaagaaagaaagcaagaaacagacttgtcaatgaatcatctgtgcaaagtcagagtagggagggaaaaaggaatcgaggatgatccctggagtttagggcagagcaaatgagtggataatggtgacatttttgtgatgaaaaagactatgggagaaatagtttggagtagcaaaccgggagttctgttttggacgggatgtgtttgtgatgcctattacatattcacaggcagaaagacagtagacactgcgctagcaccagacagatggtatttaaagtacataagagacactgaaatccaccaacagttaccagtttatgccagactacttaaacaatactaaattcaacatcaaagaagaatagaggaagatatgttcctcttattgtttgcctagaaaaagttccttaagatctaatcatttttgattcttagaagaataattattttaaggaggcaggaggacaattctcacttacacgtgatctaggaagatgtcaaaaaatgcagaatcatccagtagaagccgttaggggtcaggacacacttcacatgcctgaaacacctgttccctgccgggnggntgtcgttaccccacttctccatgggccacttcccaaacatcccataagaaccactggagaacgtgcccctatttcgtgaagccatctctgttcctgaggtgggtggctcttctcctttctgtgcatgtgagacactttgaaattaagcccttccccaggccaggcctctgctaatgacatcaggcacagtgtttcactgcattgatggctgtgtactgtgaatcccagcttacagataaagtcaccaaagcactgggaggttacactgctaagatcgctgactcggagctgctactacaaaagtaccttaacatactggatggcccagaaacaacagaaatttattgctcaccgttctggaggctgggcgtcagcagattcggtgtctggtgaggtcccacttttctggttcagagatggcacctttcctgtgtcctcacacagtggaagaggcaaggcagttcccttgggcctcttttataagggcactaatcccattcataagggcagatccrtcatgactaatcacctcccaaagttccccacctccaaataccattacattggtgattaggtttcaacatacgaattttaggggggacacaaggattcagaccacagcagtcacctagtaatgagggcagcaccaggatttgaactcagagctgtctgctccagaacccttggctcctattattttttaaaatgacgtttactctaatagactgtgaaatgcttgaggaaaaaaatatgccaagctgagttcatggagaacaccagcgtcctacatkggcaaagtaccacctatctggaactcatcttaacattttacatcttaccatgaacttgcagctactagatttgagagcacataagccaggtcatagaaatctgctatccatcaccagccactaaaggagcatttgcaaagggtaagaatgaaatcttgattttccttctcaaagctgagctgtttaanccctttaaaaatcatccaatgctacatcagaattttctcttcactcaacttcttttttcttccaaaaggaaaaaaaaaatctacattacrcttccctttgtggtaggtgctttgacctcangcactctccttcactcttgctccactgccctgggcccacccacccttcaccagcgttaccggggctgcacccaccctcatctgaaatccaaagctattcttcctatgctgcagagaggaacagccacagctctctacctcttgctccarttgttcataacgtctaatcaagataacagcaaagggggccaggtgcggtggctcacgcctgtaatcccagcactttgggaggccagggcggggggagggagcagatcacttgaggccaggagttcaagaccagcctgaccaatatggcaaaaccctgtctctactaaaaatacaaaaattagctgggcatagtggtgcacacctgtaatcccatctactcaggaggctgaggcacgagaattgcttgaaccccggagacagaagttgcagtgagctgcgattgtgccactgcactctagcctgggtgacagagtgagactctgtttcaaaaaatgaaaaaagataatagcaaagatgtttgtgagtctgctctcacgctgctatgaagaaataccctagactgggtaatttataaagaaaacaggtttaattgactcacagttccacatggctggggaagcctcaagaaacttacaatcatggcagaagacaccacttcccagggcagcaaaagcgagaatgagcgccagcaggggaaaggccagacgcttataaaaccatcagatctcgtgagaactcactcgctatcacgagaacagcacaggggaaaccggccccatgattcaattacctccacctggtccctcccatgacaggtggggcttatggggattacaaatcaagatgagattttcagtggggacacagttaaaccttatcaatgttcaataaagtgttatttacaatagcaaaaagctgaaaaccatataaatgtgttattaatacgtttgaatacatagtaattctgttgggtgaatttgggaatatttattaagaatttttaagaaaaagggaagatgcccaacgaaatttcaaaaaggatataaaatacagcataatcacaattattttaaaatggtgcttagcaaaaaagctggacaaaaattaaacaatggtaataggtttatctctagactgtgaggtcaggagccatctttttttcttcctgaatgtttctatcttttccaacttttctgtgtgcattattttatagttgggaaaaagcactattggttatattttgaaatgtgtccatagcttctggggcaaataaggctttgttccatttccagcacctgtgtaaagatggttagtcatatatggtgctaaataagaaggctgccaatgaaaaagaacgggggcatgttgtttgcaaagctggtgcattcttttatacatacaattatgctggaagcttataatgtgccaggcacagtgggagcccctgagataaaaatgttaggaaggcaaggtcactctcccaagaatcttacaagatgagagatgcccacttaaaatcttggaacgaaaaaagaaatgtttaacaagggtggacmaaaatccttaaagaagatgaatacttttctttcattaccattaaaaaaaaaaaagaaaaactttccagggatttaaacaaacaatcttgaccaaatataaaagagtgataacagaaatggggtcccaaatagttttccaaaacctgttcactaccttctggagggatggctgtaaatccccccgcttcccgctcaaacccgctcccaggaagggaatggaagatatcgcaacctccccaaatatggtttgtactcaagccttacctctgggtcacatttcctccttctatcgaaaggcagctcccctctcccyataaaktgcgccgtgtttaacacatcttgccttccacagtaatgaactggagatctctccaagcgtgctctgtaatctgaattgcgacatcttggatcctccctgacatacagaccaatctccctcccactcgctctcctagagagcctccttttcccttcatttcactgggacagtgatgccacagttccgtcactagcaaaagatctagacatacacacacacacacacacacacacacacacacacacacccaccccactaaagccctctttcttttcattttaagctaaattttgccaagtcacatccatctagaatgaaaaggtcccaaactacccaaagtgctggcttcctcagcactgaagcagacagttctgtgcagcggaaggctactctcctctccctaaattcatgctctgggggatgaacctatgggtgcccatccctgcggctgtgccctgggaaacagtggtgtcctggaagcatgaataacaagactggaaacgactccacgttcctgcgtccaaagcttcccttcacaaacaaagatgcatgagtccaagggggttgtccaaattcccactgttggggtcacagtgacaaaggctgtctcctttgaccaaacttgagtcaggatgccaagtcctctttctgacaaatccttgaccttggcccatttagtccagttttagcaagaatgcaggcaggcaggtgtagcagcaaatgtttcacccttgttctgaccactcctgatgtttgatcaaattcctcctccccaccctgtagggcagatgcacctaacagcaataagtcaagcacaccctgagaatgactccatggtcttaaggaatgtgtgttcgaagttctgagctaaggaatccaggagtggccgcccggagattcatctgaaggacgtccagacccctggcccatcccttggaatggcaggcggtacaggggattgaggccctttgttttgggttaaatgaaggttgctaggtggaggttgccaggtggaggttgccaggtagaggttcctaagtgaaaatgccatataacccgcatgcttcttacacatgagagccatcttcctgtccagcttggggctcctggacagctctgtatgtgagtccccaataaaccctacgtctccttagctggctccaggtctgttcctcagcctattggacatggcaccatccctactggagttaacaggggttctgcacgacaaccctcattatttttactttaggagataggatcttgccttgtaacccattggggagtgcagtggcgtgatcatggctcactacagcctcgacctcctgggctcaagtactgcgcccagctttattttgtggggggcgcaggagagtagagacggggtctcacttttttgcccaggctggtctcaaatgcctggcctcaagtgatcctcctgcctcagcctcacaaagtactgggattacaggcgtgagaccccgtgccggcccagtcctgacatcttatcacctggcctgccttcagcaagaattctgtcgtgtcgttggccagaatcccctgttctcctgatgtttcctcttaattttccatccgctcacctgcagcccggctcctaggctagaaattcccatttctccttgtattcagagcatcgtgttcactaatgtcccttggccttggcctccatctcacacactcttcccctgaatcactgagctccagccacgccaccctccccagggcgcctgggcgcgcccagtttgcagccaggaggacctccctgcatggcccctgacctccccgcctgaggggaggatgaactgcgcacgcgcagcccgtcttccctccctcgggagcccgggctccctacagggggcgctctctggctgcsggggcaagtctgattgaaccaggctctcagtcattggctcacttaccggcgacacagggcacaggctccatggccagccttaagacacacacgcaaccttttcgccctcttctgcatgtttctctgccctgttctgctcttggtcagatgccggggtgaggagagagggacgctcttttttgcccactccccsagagcgtcccggctcttgcttccgctccgggtcattgcagttgcctctgcttgaaattccttcccttcctccagatcctaatctgacttcttttcggccaggtcttaggtcagatatcactctcgatcacttaccctcttctatttccttcatatctttttttgcaatctgaaatataatagtgttaattttaaaaagtgtatttattcctggtccatcttctccatcgggaggcgctgcctgaaggcattggccttctctgacctccttcccactaacctcaggggctggaatggtgtctggaatagaggaagtgctcagtggatcggttctccgtgctgaaagtaggcgaacagtcaaaataaataccccacccttacccatctccccaggagagacattagagggctcctgctggctcaaaagaaaaggtggataaatgctaacaatagggatgggccccgaggaagctaggccgcccctgcatgcacagaccctcctgtgggcatgccccaccagggcacaaggggctggcagtgttctggtgcgacgctcttcattcagtgtggactggcagcccaggagcaccggtcacctgaggacagcccccagggcaagacagggaccaaaacacacagaaacagacaattcaaggaacaaaaccaaaaacacctattccagtttatatcctcatagaggaaaagacaggatgctaggaaaaaggaaaattcagagaactgtaaaaagcacttggaaattaaaatatgatagaagagattttttaagagatttggaggataaaataaggttatctctcagaaagacaaaagggacataaagataagaaaacttgaggattagccacagtagtccagtgtgaactataaagatctcaataggacaggggttgataaactttttctgtaaatggccagatagtaaatatttcagacattgtgggccttacagcctctgtcccagctactcaattctgccactataacacaaaagcagctgtagagaacatgtaaataataaagttttgttggaacacaacacgtagttgtgcagataaagttttactgaaacacaatcattgtatcagtctcagactcaacagtggaagcaggaagcaatgctgtgaaatttttgaaggaaaagagttccagccagaattctatgctcaaccacacatccatcaagtgttatggaaaaacaaagatatcttcagacaggtaggggctcatgaaactgacttcctatgcatattttctaaggaagttactggagattttttcctggtaaaatgaaggggtacaccaagaaagaagaaaatacaaacgcagggacaggcgatccagtaaaggagatgagcaaagaaaattcccaggaagtgaaaaaggaagcacaaggatgacagcttagtagcaatcctggggatgaaaaggctagaccggacagggagatagaggtgccagagggatgtcactaacaaaaagaggaataatccatccaggcgtggtagttcacgcctgtaatcccagaactttgggaggccaagatgggcggatcacctggagtcaggagctcgagaccagtctggccaacatgatgaaaccccatctctaccaaaaatacaaaaattagccgggcatggtgccacgtgcctataatcccagctactcaggaggctgaagtacgagaatctcttgaacccaggaggggaagattgcagtgagccgagtgtgccactgcactccagcctgggcgacagtgtgagattctgtcttaaaaaaaaaagaaaggaaaagaaaaagaggaataacttaattcatagattattgaatgtgtttgaacatatttatacttctgatggagcggtcggggataagtgaaaattacatagaaaatcaagagagcaaaaacaaagaaacaaaaaacaggcaagtattaactccaaataaaaacctgtacagaaaaggagatagaatcaaaaggcactacctagctcagcygcagataatatttacatattcacaatgatacaaacactgattattgatctaacaaaatatgatttaacgtcaggaggacaggagaaaagggtgtgtgtgcatgggatgaggggggtgagagcacaaaatcctcatagagggaaggtaataagcacaaaaaaaaatgaagagctggtgatcaaagcctttctggttggggtgaactgcacaagaacagctgaaagaggctgccctggaggacagggagccagggaggacaagagagggagggaggagcaggggactgatgcttctctttccaggcacactcaactattgggctttaaaaacgatttacatgtatactttgacgtagacaaaagtgaacgataaaaaaggacagagcagcagcactggaggaaaaactgcaaacaagcaacagcatgaaggagatgctcccgtgggacccatgcacactttgggacagcaggagcagggcatggcggggatgacagggtgagcagccaactcagtgggtgtcagaacttcagggctgaaatcctcaaagtcctgggggaactgggacaagttgggygccctgggtggggagagtgctgatggtgggaaggtggccaggtggattagtctgtactcgcactgttctcaagaaatacccgagcctggatactttatagagaaaagaggtttacttggctcatggttctgcaggctatacaggaagcatagtggcttctgcttctggggaggcctcaggaaacttacaattatgttggaaggcaaaggggaagcaggtgtgtcttacatggccagagcaggaaaacagagagggggaaagtgctacacacttttaaacaaccagctctcacgacaacccactcactcactttcacgagaacagcaccaggggacggtgctaaacaattgatgagaactgcacccccagaatccagtcacctctcaccgggccccaactccaacactcaggattacaattccacatgagatttggcggggacacagatccaactcatatccccgagggtcaaattggggcagtcttttatgctgtactgaagatttgcatttttaattggatgtgagaagaagcaactcagagatttaggtgggagagaaacatgatccgatcagtgttttagagagatttcttgggcagtcatgaggaggacaagaccggagggaaaagaaataaaagtgaaagtgactgggagaagcaccaggaatctgttccaaaaacctgggagataactgagcgtcccaataaaacccatagtaaatgtgggggagagatgagatgaggccctcatgggggtgtttgggacatagagtgacaggacttggygacagatgatggggaggtggggatgaagtgggtgagcctggaggttggcgggtggtgtgggggccgcttccctgcaccaaccttgctggaggcgaggggctctgcgtccctggtttgtggtgcccaaggggaggggggtgtccagaaggaggaygggcctggctgcagccgtgggaatgacccagtggcccaggaagcacccctaaagtgaaagggaggtgaagggaagggctctggggccccttagcccttcaggatcaggcagggagagcctggaaaatgaggcatcaaagcagcagctccaagtcagaccaaaggccaaacaaaagctggcgaaacaagagggatgggataggcccacgccactgccaaaggctgaaacaggtccctgggtccctgaagtccctgaaggtatcagtgtctgtggggagaccacagcagccgtggcaggaggagcacacgggaaagcctggacagcctggacgtgggcggggacggcgcctgcctgagaagcaggtggacacnnngagcaggaagtgggaagagctaggccggactcaggtacaggagagaaggttttatttttatttttgtaaacgagatgaatcctgcactaattacaggttgcagaagtgtcagaaagaggcagggggaagtagtcagaggatgaacactttcttggagacaggtgaaagcagggaagggcagggcctccgtttccttgaaggaggcttgaggacaggggggtaaatggtgcctgtgaggtgtggaagggacaagtgcaagggtggctgagcagccctgggactcagtggggactgaggctggaaatctgtggacagcacccacctccatggccctaggcagaagaagagggcagarggttgggcccgtgtcaaggataagccccttgagaccctcaggctgcttctagcaaaagcatggctaaagcggaggccactcagactcacggcgggggcttgctgagccccaggtgtcctccctcccatcttcactcaagatgccagggccttctaccctcattgctaatgggcatgtggcctgtcctcagggtgctagaaaggggggtgcacagagcaggataagggttcctgcagcagaggcagctgtgaggcaagcgtgctggatgggaacgagggatggccggcagtatccaccttccccatgcgygtacgactgaaagttgatcaaaatcaaacctgctcattcaagaaaagcagctgggaaatggttgccatggtgttgacggtgcacagcacacagcagcattggccctgctccccctcagcgctccaagtttgagtcttagtgagtgtcagtgcagcacagggccgctcttatctgctcctgtgtcgtctgcactcagcgcatgtggagggggttcaacttctgcggagcctcctgggcattgcagcgcaatggctaagggcactccatctaagaacgagcctgtttgggtggcagggaggagcagcttgcgggatgtggacatttgcccctcttcgttcactggtgatgggaagtattatccttcataaggccagcagatgggagagcctggaggtcactgctggacagtaagaacttcccactgagccggttctcaggggtcacactgcagggctggggtttagaggccctttggagctcagggttggccattagcagttatgtgtggggcttggccctccccagcccactctgtcactccactgtgtttgttggttctaagtctccccagcacattgtcatcttttaaactgtggttttattgtccatctctgggagcctctcccactgcactctgcccagggtgagtgctccacttatgcatggaggtgctcaccagtttaggaaggggcaccaaggagcctttatctttggagcaccagcaggaacaaacacaacaccaactcagcaaaacagcacagtggatattctgcctagaaacgggtctgaggtcarctcttgagatggtgtctgctgtgtgacgctaagacagctgagactaaaacagaatggaaaggaaacagccctctctggtcaaactgctgttcttggccatgtccatccattgtcctttctctccccccacgccccatcgtccttcaggaaatgtcccaggaatagtgacagaatacacacccaacacaccagaatctaaggaatataacaaaatttaaatttgaaaactggaggactcacaaaactttatgtccttatatgcaaacgacacacacaggygacactgtaacacatgtctgctgaagtttttgggaaaaaaatcctaatgggcttaacttgtgagagatggtggtttcagcatattgctgttcataaggaagaagtatggcttgttgtttgcagggtgtgcagtgatatgacacatttatttattttttcttcttttattattatactttaagttttagggtacatgtgcacaatgtgcaggttagttacatatgtagacatgtgccatgctggtgtgctgcacccatcaactcgtcatttagcattaggtatatctcctaatgctatccctcccccctccccccaccccacaacagtccccagagtgtgatgttccccttcctgtgtccatgtgttctcattgttcaattcccaccgatgagtgagaatacgcggtgtttggttttttgtccttgcgatagtttgctgagaatgatgatttccaatttcatccatgtccctacaaaggacatgaactcatcattttttatggctgcatagtattccatggtgtatatggatgtgacacatttaaataagctatttttaaccatctgaaatgctctaggaggaggtgtattacagcattacagtattacagatcataaggcaaataaaatacatttattttgtgtgcttgatttattcgtggcttacaaggcaatttctattaagtgaaaactagtttaagaaactttgaatgttaattgtggagcagttttcttgaaaattcagaaragcaaatcacttatttatgagttcaagaaaagtcaacatctggaggtgtagcatttgggaaaaccatctttgttgccatttcaactttctctcaataggtaagattggtaattaggggaaagtgccagcttaccagaatggaataagacctaagaaactgaatgactagaaagtacctgtgatttcagtgaaggcagttttccttccctgtccttagaaaagcggaggaatgacaatgagagcaattccagtcatgagcagatggaagaaaattctccaagtgttctgttgcttccccctctgcacaggatagaagaacactgtgtttctgattgggcataaaatgaagggactcatgaaccgaagctggagaaatgccatgattgtttatgggtactcacatcagggctggggacagcatagcctccagctttctaccacacaccccagaaaatggacggctgccttgaggacccatctgccaatttcctcggcagtgttcaaccttagtcttccagaaggaacaggacaatatatggggcctccacactggcttctgccattcatgtgggcccgtaggccrtcgtcaggctggctcacaccctcatgaggttagcacagccacctccacaccaagccattttctcagggccccgtgctggtgaggcagagccatgcaaagtagccagctctttactggtgtttcctaaacacgttgaatgaatgcacacagtgaagcaggagggtgtgagcggtggggtgtgctttccatcaccagcccaaagctttgtctgctagatgtaattcctacattcacttagtgagcagggcaatagactcgccgtactaagttggaactttgttgtaattttggtgctgagtggggtgaggcttaggggaaaaaaaaaaccaccttagagccgtctttcaaatacatagcaataagaatcagttcatgacagataaatgacaatagtgagataagagtttccatagactagtttgcacagtgtgagttagggggatgcaatgaaagaaaaatgaaatggcaacaaatgagagaagcccattttctccatcattaccagtgcttttccttctataacaattgtaataagtgacttaagagtttcccattttcaaaaaggtacttttttctttcttttttttttttttttaagagtcaggggcttgctgtgttgcccaggctggccttgaactcgttggctcaagtgatcctctagcctcagcctcccaagttgctgggactaacttcaggcccacagtaccatacctggcttaaaaaggtgcttttgctgcattcctcattattttctttcagacgccccttagttccttcatttgtaacaatgacaatatttacacttacataaggctttagtatttaaattactgcaaatacatgacctaatttgattgctggagaggtaggtaaggcagataccagaaacccacactttatagaaattctatctttttttaggatgagttcatgtcctttgcagggacatggatgaagctagaaatcatcattctcagcaaactatcacaaggccagaaaaccaaacaccgcatgttctcactcataggtgggaattgaacaataagaacacttggacatagggtggggaacatcacacaccggggcctgttgtggcgtgggggagcggggagggatagcattaggagatatacctaatgtaaatgacgagttaatgggtgcagcacaccaacatggcacatgtatatatatgtaacaaacctgcacgttgtgcacatgtacccnntnnanngaacttaaagtatgataataaaagaaaaaaaaattttttttgagacagagtctctgtcgccaggctgttccagtctctgcattccaggctggaatgcagtggcgtaatctcggctcattgtaacctccgactcctgtgttcaagcgattctcctgcctcagcctcccgagtagctgggattacaggcatgcaccactacacctggctaatttttgtatttttagtagagacgagatttcagtatgttggccaggctggtctcgaactcctgacctcaagtgatccacccgccttggcctccctaagtgctgggattataggcatgagcccccgtgcccggcctgaaattctatcttgtgataacatgtcagggatgaactcaaaataccctttgatgaatgttcacatgatcaaatggaattcttcttctctcccctgcagtgccagtggtgaggggactctcaggtgttatcctataaggtccagaacatgttaacagatgctttgtgttttgctttttttaaccatggaaaggggaattgggaattagatggacattgaagacagacttctctcccagcaaaactatatgattctggttatccatcttaatatttctgcatgtcaatttcccatggaaaatcaggctcatcacaggaaccagctgtcatcacttctactgtcttacaaagcggaaacacagcttctcggctatacttgacagtggtataggagtttgctatcatgtgtttacgaaaatacagtgataagaaacttaaacactttgtttcttctgggaaagtgaaggaaggataaagagtgaagcccatttccacccaaagtctaagcttaccagcaggtggtgctgtgacaaaagcaatcaagagaaaccaaggcaggcaggtggggtttctgggtcccagagatcggctctgctacctctcatcaaagccagtgctcgggagcrggagcgaagggcaggaagcttgagggcagcacagggcgggcagcatgcgctggatccaacaccaaacagtttctagggtcctcgatcaggggttcttctcctagcaaggctcaccacagctctccgcttcccgtttcatttcttcctttctctcccctcaaagccctttcccaattatctggatttccagcaggaagcagggaatagagcaggcgggaatgcccttctccctaatacttaccctgcagacactgtggcttcagggatcttcaaatattaagcactttaatattcagaaagcactttcagttgtataagcagctctacatatactattagatgctatctggataaacagaaatgcaaagaaactcctcagaaataactgaggcagctcctatgcaaccgcatggagacctatcagctaagtctatgccactttggtcactcaacatgtgcttgactgaattaccttttcatctaaatgccctacttaccccaagcctccaaagggcagagtctcactccaaggtgccttacatgtagtatgtgcacaatgggaccgaaaagagacaataaacccagcagcaagcacaaataaactggaggactcaggaaaaaagcaattccaagtctcatacccctttctcctgcagcagacacagaagttaggaaatgaggtgtccctgcatcagagcttgtggggcccagtggctgcccctggcacagagttgctgtggggcccattttagaatctggaagcgattgctgcctccgtggaccacgctcagccagttctgaccactctggaagtgagctgcggtggaagagatccacatacaaggcckgggtstgctccacccccggggacaggtgaaccctgcccagagggggtttaagaactgaggaagtcagagaagcagcccagacctgcaggaactaaggcgtcggtgtgagagcttggagttgtccacatctgcttcaacccagtggggcagcccgagggacaaggtaaggggctgggaagtggaaccggggcaggggtcccaaggtggtttagcttccagtctcagccagagcgctccgcctgtactggggagtcagctyccttggtccctgggtctctcactgggccgagatgaggcaattctcttccatggctttagtggtttccaaagagcactgtgtgcaagtagcctgatgtggaaatgaagtacggccattacgaaaacaaagtccacccagcggcctcctagagggggacacagagcccaccaccaagtctactagttaagaaataagaactgccctgtcactgaattagccaggtcccacccaagggcagacctaaagaaggaagccaggtctacataggaaggtggtccatgtgagatgaagaccaacagtatcttccacacaaggttcacacgtgtagggtgggggcgaggtgaaggcggaggtccctgtctgtaaatgcagttgactagtagctgggaatactggctttcttaagtacacaccgctgcacctacacgattcctgctggtggtggaaggcaagccaaccagcttgattgaccctgtccaagtaagaggcaggttaacctgcttatgtgagctacaggccccccargaaaactgaaaacttcgcttcgtgagagtaaagttgtccagggatctcccctatctatgcaacctctgtctatcccccttctcacatcttccctaagaagtacccaaacatcttaccctaagtcataagaagaaatagaaaagctgtaagatcaggcctggcacagtggctcacacctgtaatcctagcactttgggaggctgaggtgggcagatcacttgaggttaggagtatgagaccagcctggccaacatggtgaaaccccatctttactaaaaatacaaaaattggctgggcatggtggcgggtgcctgtaatgccagctattcagaggctgaggcaggagaatcacttgaacccgggaggcggaggttgcagtgggcagagaacacaccactgcactccagcctgggagacagagcgagactccatttcaaaaaaaaaaaaaaaaagaaaagaaaagaaaagaaaagctgtaagatcagctaattatactgcttaccatttggttaatttcacatttcattcaatgtaggttaacttactggatgtttttctcttaaaaaaaaaatcagaaatatctgataaccccaatattccatccattctttctaaacgcaagctagtgtgactgtctccaagaaacatctggctgctgagacaaaagcagatacttgtaaatacttgtaaatttcatatttattgtaacaaaaattatgacatgtccatttgtgcattctgcttgagtataactctgggtatgtaaatggcctaatggggcactatacaaccatgctgattgtggcagcagtaaggaacacagttaaaagtgtctgtcaaagtgggaaggctgggacaggggaggaaaatgggttcagggcccttgggtgcaggttcttgtccagtggcctaagatccatttcctccggacagaaacactgcagctgctcagcctcctcattcagtgaagtgagggtgagttgtgaggcaggcaggctcctcagaggggagggggaggggaaacgtcagttacttgggctgtgtccttacgccaagactacaaaacatcgtaagcctcactatacaacactgagctatttacaatggaaattctcaatcagctgttctctcagagaaaattagtgaatcccagtgacttaagtcacctgacagagtaaagcaactcctaggagttagtctccatattctacaaatgtctattattttcaagacaaaaacaaaacaaaacaaaacaaaacaaaacaaaagccttttccccccaaagaaatacagaattacaatattattaaatcatttagcaacggcagcctgccctgccttccaaacaaacaacaaaaagccattttaaaaaatattacattatcattaactgtttctctgtaatatattaaaccttttgttctttgtctttacatatctgatatgttagggggagaagttaacaaatgtaaatcatattggtaaagcatcactagaagaaagtggtgattacttaaaaaaataacccaaagaaagagaacctacagattagctgcgatgacaggttgggaacagtgtctgggggaaggatgtggagtaaaacccctggtttaatgtgagcctgggagactcttgcaactcagtcttttgtggttagtttatttgttaaacagctcggctgggtcatagtggcgtgtcgtaataatctggcagctggtccagctggtagtgccgcggcagctgcggctggagctgagggggtggtggcggctgctgctgctgctgttgctcctggtgatgcttcatgatttctttgacctcctcttccagctccgggggtatgataaactgatcatcaggatccggctgagccggggcagcaaaatagcctccaggctttcgaagaggtgcgtctgtagccacctctatcacattgtggctcctttcctggggcgcaacagagccattggccctccggcgcccaatggtcccaacggcagagaagtctgccttcctgggcagacctggctcatcctcgttggcgctgatgacaatgccctcatcactggcctctgctggcacctgaagcaggtgctgctgtttctccttctccttggcccggctgcagtggatgtccacctccacctccacccggctgccgttggtgaagacgccctcgatgggctcctcatcgtcactgtcaaggccgttgtcggagaaggcgctagagaacgtggcgctggatagctggcgctggaaggagttggacagacagatggggtggagcatgcagcgctgctcactggggtaggcagggctgttctcgcttagggctccgggcgggggctcatcggaggctgttgaccccacctcgctgctcatctcagaagtggagagctcactgctaatctcggaagccatgccgctgctggaggacggcacgcccagcccnnantnctgagggccgatccttgatcaccatgttcactgagggaggaaagatgccaggactgggtggtggcacagccccaccggcgctgagctcgcagcagcagaagctgtcctcagtgacactgagctgcaccaccacagcgctgatgctgtcgtggcagccgtagctctgggccagggtacacagcttcttggcagcagccagggcatcgggcacgttgcgcacggcttccacggcctcctcgacggacaggctgtcccacaaccccttactgcctaggatgaagaactcatcctggggagtcaggagcacggactgcacgtgggggcgaggcaccacactgggatggaggaaggtgtagcccaggatgcgcgtggactcagtcactccgttcaccttgccatcctggaagaacaagggtttgcagacagacagttaatacagagcacctgcggcaactgtgcaggttccctgcgggtccctcgactgtctcgactgtaggaccacagagaagtgctgtgtggcccacagaggaaagaagggctcactctgtagtgagtagttaatgtgcacctgtcatcagaaaccccaggtagtaggcctgggcaggtaaggagcagtagggacaaaaggaaaagatttcggttatgtgtgttactgggaccccattcacactaggtcacaagtcctgctgtttatctaaagcaagccatcatctagccttacacagcaagcatagctggctagctcctcctgtaaacatgggtttacatcttccctcccttggtgaacatggtgatcaaggatcggccctcnangnacgggctgggtgtaggaagactctgaggtagcaagagactttctgatagaagccagtcctgagcaaagacacatgacgcaggcatatatcaagacaatgctcctaaatcttccattgctctccatgatcacaagaggcagtagtgtctaaaggtccagagaggacttgaaagtacttaagcggtggagaaaaccttggtttgactaggtgggtaagaatgctcatgtcaggagaacagatgctaaagaagaaatgccaattcttacaacttccttgaacttgatttcctgttgaccaatggagaaggcaagatctgctggctttagttcagctgtgtgcatgctatttaaatcaattaccaaagtgccagaccacttgccaataaaaagacctgggtttttttttttttttttttttttttgccacgtgtacctgcttggttctttattcttcaaattttgagattctcaggtccatgacatacctctacatgccctagttttaacacttctttccaggaaaggcttcattatgacaaatccctgtctgggatgacaaagtgtttcttccacagaatatccatttcctttccagtcctaccacttccctttatttgggatttggcaaggtgtttacttgtcctagggatgtctttcccagcttctcacacaactttgccacaccacacttataagcaggtaagcattcctattagtaaaattagtaagatgggcttcaagcacaaccttaaactgccttgattctactgacataatctgtccccaaagcatggaatttggcagaaactgttcttgctgttctgtccatccctttagatttctctctatcaaaaccaatggttttgtgattcatgagcaatgaagcttccaccatgggctccaggagttctgctccattcgctaattcatcaaagtgtcagtcatctgccctgtgcctgaaaaaatgacgtgggcagacagcagtgacctgcaaagaaacatctaccttcaagaggtttccagtcttacattgttgataaaacccatagaaccatgtacagtttggggtggactctggtgaaagcttatagtccagtagagaaaaaagactgactccacacaggctttgatgagggccttaagaaagaaacagaaagactcaagctatacatgggattctgtgcaaatgagtctgtgtgaatttgttctctgtctattcttggagcagagaggatgcacatggatggtagacactgtgctagggagcagaagacagtctaatgtgtacagaatgcactgawttcaactttagttcaacattatgccaaacacaatygaaggtaaatgatttctgtgacctacatgaatcatggtttgcacgtcagacttctcttgttttctgtgcctcgcctcttccctgcttttgtttgcattgcttaatactcaacaacgaggttttgttttgtattgtattttacttctcttccttgagacacgccctccaaacacacacaccacagtctgtgttgtggagactgccctgtgcattgtggggtgttgagcagcattgtcctagcagcgctgtaggatgctcagtggcctcaatccactgcatgtcaattgcactctccgccccagctgtgatgaccaaaaatgtctccatatgttgccaaatgtcttgtggggaagcaaactgcccccagttgaaaactgcttactgtgtactcaaatgggacatgaggtatgaaccaaaataacaactagtacacttacatagacgttcatagtttacaagtcataccaaccttgtaagataggacagatgcatgattattcccactttacagatgagaaaactgaggcttagagaggtttaaaggtcacaacctacaagtggcagagctaagatatgaaaactagcagtgtgatgtcaggggtagagccctcaaccaccaaagcagccctctgcagagtggctgcaaacatggaatgggatcatgcccatgaagcacgcagcacagtgcctgatgcagagaggcaaccaacaagcatatacatcataatgtaagacatctgctttgtgatactatggatttggaattctaatgtcaaaccaacttcaaaagtgttctttgaaggcaaatgctccctagctagtttctgctatgacctggtcycctctcctctcctctccaccatcctgggcaacacccctgttttctcacctcagtgataatggccttgtgctgtttaatcctcttcagctcttcttcacagctcatgatgtaagatctggacagaggcagcggctttccatttcgacagagaactgtttggcacttgcccacattagcagaggtcaaggtgaaggatcctcctggatccacagggtcatgcttgatatgacaaaggacagcggcaccaccaagcttctgcccagcagttccaagtttcctggaatccgaagagagggggtgacactcaaacacagcccatcagtgccagttctgcaaattcaacagcaagaccgcaccactggacagggccaggaaggagacagctggggattccactccgcctccttcatcaaagcacacactgctctgcctctttgatgaaaagagcccctgaatctgacatcacacacatccacacagagaggctcacaactggaagacagtatcactgtaccattaaaagccacaggtgctgctctggaaggcgggtgcccctgggctgctgtgtacagcctgctaccctcatcaaccacactgccctatcagcacactccaaagacagcaggaaaatgacttctttctccatctgcttctctaaatcccctctgtccccaggaaaggaacattgaaaaaaccatgtatgtaagagcaggtataaacaccctaccccactgacaggcacactttagaaaaacctgacaaccctctcccccttataagggtgtttgctggtagcagccttgaagtattggagtgttcatgttcctgccctatatagtaaagactttctggaccagcaccatctattctagaaaactcatagaaaggacattctagtaatcaaataccaagtgcttgtgatttatctttttaatcatgagaatccacagacctaccaaatacagaaagcacctgcaaattctgaaaatcaaaaatcaaaaacccctcttacaaagctacttgttctggcagattatcaagggagagaaatggcagagasggacaaaagaccattattgctcccatggcctcatgaacaactatggcaagccccacaaatggtaacactgcccaggcccctgctgttcctgagtggtacaggagcaagaaagttaagaaaaacagcctcccgttttacaagggcagaccctcaggtactgtctgctcctatcacgtgtgtaaggtaagcaactggcaagaagagcaatggaaaccagggctgcctacttgcatgcattaggaaatcccgcacaaagaccagttcccctaaggaccaaaagctcaccacacaacccgtaccctcttaacagatagggaaaataagagacatacaaaagaccctggagaagggcctatagtttaggttcctaaactccaactttcagatatttggctctagacccttccaaggcatctctactttctccctttcacaggcacagtgatttgtaaaaagtatagcaagtaatccgagactggggttctcagtttttaattctkacccagtgcttgagggtgcataaaaagcagaccttttgggggttgtgaagggatgtgtttgtgctgtggtctgtatgcacatgtgtatgtgtgtgcatatgatacatgcttgctgtttttctagaacaaaagggtggtaaaaacaggaaagctgatgtgcctgctagttacaacatcctttgaagggagtctcacaacctgaggtcaggtcctggctgcactacctattagcccgtaggcactgtgcttcacctcactgtacatcactttcagtaacattacccagctaactggtaacaatttatgacacataaggtaatttagaacaatgactggtacatattaagggcttgctggatattagccattattgttcagttgctaattgtatatgctcactgagaatctgaaagtcaggggtgagtgtagcagcaagaaccaccccaggcttgcctccaccaagctctctgagaggaaccatttgtgatgcaggtatcactgtaaaggctgctctgaacactcctccccagacaccacttctacccctctaacaaagctacttgctctggcagaatatcaagggagagaaagagcagataaggataaaacaccatgactgctctcatgacctcaaataccagtacattcatcactcctgggtcccacatgagtgagtctgcagcacaatacttatagacaggcaattccattattacctagaaagccatgaaggtggtaagaataaacaattctctgaatgaaggaatcctcattcctctaagagttacaaacaatattccacaatttctacagcaacctaaagctctgctgctggtggcaactccaggctatggcctaggattctgccagtaacactgtcttgaacatttaataaaggagaaaacaaaatataaagaatgatttaactcttgggctaaaatctgaccatcttgatttcacaaaggtttgcactatctcaaaccagtgatagtatttcataagggccaagaaactaggatagaaacggtccatttcaaagagaggtccccacaacagaaagtctaaaaagcccctacagctcacatgatttgggaggagaaatggcattgcaaacaatctgatgaaaatctgcaatcaacacaggccagtgaggtccagttctcagagaaactaattccttgtcattgtctgagccttctacaaagttgtctgaacatcagtatgtctcaaaccggagcaccattcctgatgcctgggcaacaccaaacttgcctgaatgcatcttggtactcatagtcaaaaaacatggcttggagaccattgggcacctgcttttctaaacagaggataaacactcaaagagcaagaaaacacacagcaggtaagcaggaactctgagttttacctttgcatgacaatgaatgtattgaccatgtattcttcttcgttttttgttttttgcagctcttcagccaaaatgtcactcatagtgcactggagaaggtagggcacctccacattccggtctccgtcaaacacaccatacagggcttcgcggttgtcacagaagttattcaccgacagggctgcgacacacaacctgcaaggcaaccacacttctgtgctgagtccactcatcctcctgctccaggcccagcccagtgcttatttcaagattttcctaactcagttttgtctctttcttcatgactccagacagattaagggcaggtaaactgactccagctaatttccaacagccaattttgataagcagagaaggatgagcacaaattatgcttcacacatgccttcctacatgcttctcttctgatgagtttatttttaaatgtcagtgacagaaggggaaaaagaggcatgggaaataagagaagattatgaatccatatctacacatacattcaataagcagttattaaccacaatctccacatccagccaaaatagaaaactaaaacactgggaaaaatagacgaaacctatatgaaaagcatgtacaaatacagaaaaagcctcaaatgacttttaaaaaattatttttatttttatttttttttgagacagggtctccctctatcacctaggctgcagtgcagtagtgtgatctcggctcactgcagtctccacttctagggctcaagcgattctcccacctcagcctcctgagtagctaggactacaggagtatgccaccatgcccagctaattttgtatttttagtagagatgggatttcaccatgttggccaggctggtctcgaactcctgagcttaagcaatctgccagcctcagcctcccaaagtgctgggattacaggtgtgagccactatgtccagccttcaaatgacctttttaaaaggcaggaaaaacaaacaaacaaaccccaactggacaataagagcacaggtcagtaatcctggagagagcctgcttcccgcccagcttcctcctggggaagtgtccaggctgcagcacagggaggaagacccaggtggaggctgtggtctccgtgcattgaggagatggagctgggggctgaaggaggacaaggtggccagagtccacagtcagtgcactggaggaggatagtggttcccggcaaatgtggaaagtttggagactgtctccactccaaactcaaaagaatcaaactgtttccaagcaactgtgtcccagaaactgtccaaaatgaaacagagaggaaaaaaaaaagactgggaaaaaaaaaaaataaggccaggaccttagtgagtggtgggataacttcaaacagcctactatactatagggagttggagtcttcgaaagaagagacagataacacttttgaggagttgatggctgaaaacatttccaatatgaagaaaattataaaactacagatactgcaagcaagacaaacatgaagaagacttaactgagacacatcaaaatcaaattgctagaaaccaggaacaaaggcgggaggtagagcaggggaaaccaggacgtgcccaacagcaggcttctccctggaaacctggtaggagacagtggagcaacgtcttgaacgtaccaacggaaaacaactagaaaacaacctagatttctaagccagtacaaacagctctgaaaagttaaggggaaataaagacatttccagatgcacaaataaaagcatttaccaccagcaggatggcactaaagaaatggaaaaggaaatccttgaggcacaagaaaatgacactagatggaaatccggaactgtacaaaagaatgaagcacaacgataatgacagccaggtgagtgaacagaaacatttcctcattttttgtttcatttttttttgagatggagtctcactctgtcacacaggctggagtgcagtggtgtgatcttggttcactgcaatctctgcctcccgggttcaagtggttctcctccctcagcctcctgagtagctgggattacaggcacccgccaccacgcccagctaatttttgtattttctgtagagacagcatttcaccatcttggccaggttggtctcatactcctgatctcgagcgatccgcccgcctcggcctctcaaagkgctgggattacaggcatgagccaccatgcccagcctcattttcttattttaaaaatcaccttagaacagtgattcttaatagaatattcaataatatyctaatgggtattgggaggcaacaacaaagaattatctggctcaaaatgtcaatggtattgaagttgagaaacactgctttagaaaataactaaagtaaaaataacaataatgtattttggaggttataacatagatggaagcagaacatatgacaacaacagcataaaggccaggacaggagaaggagaagtacatatttgcaaggttcttatatgtgaaatgacattactattacttgaaggtaaacagtaatgagttaaatatcacactataaactctaaacaagccacacatgtacacacagagacacacggtagaataagaataaataaagataaaatcaaatcataacaaataatccaaaagaatgaagaaaaaggaaaaaggaaataaagaacagatggcacaaatagaaaacaatagtaaggtggaaggtttaaacctaaccatatcaataatttcattaaatataaaggccttaacactaccgaaaagacaaaaaattcagactgaataaaaaagacctaattatatgccgcctataagaaatccattttaaatatgagacaaataggttaaaagtaaaaggattttttaaaaggtataccatgctaacattaatcaaaagaaagttaaaatggctatgttaatatcagacaaagtatatttcagaacaaagaatattataggaatagagagtcataatgataaaggggtcagttcatcaagaggctacatcattctaaatgtttacatacttaacagagcttcaagatgtatgaagcaaaaactgacagaactacaaggagaaacagacaaatccatattcatagcctctcaatcatcaacagaagaagaagacagaaaactggtaggaggcttgagcaacaatatcaaccaacttgagttaactggcaccatacccaacagcaattttttttttwaaatgcacacagaacttttaccaagataggtaagattctggaccaaaaatcaagtctaaataagtttaaaggattcaagtcatacaaagcgtgttctccaacgatattagtgaaattacttagaaaaaaatttacaactctaaatgcttatattacagaattagaggtctcaaatcaataatctaagcttccatttaaagaaactagaaaaagaagtacataacaaacccaaagcaagaagaaagggaatcataaaaataagaaaagcagttgagtgtgatatctcacacctgtaatctcagtactttgagaggccaaggcaggaggattgcttgaggccaggagtttaagatcagcctgggcaacagaacaagaccctgtctcttaaaaacaaacaaacaaaacaaacaaaaaaacccaaaaaacccataaaacaaaaattaaaacataagaaatgtgaaacagaaaaattatagagaaatatcagtaaaacaaaaaatctagttctttgagaatatcaataaaatcgataaaccaaatcaaactgatcaggaaaaagaaaacacaaattaccaacattaggaatgagagagtggaggaacatctctacagattctacagattttaaaagcataataatgggctgggcatggtggctcatgcctgtaatcccagcactttgggaggctgaggcgggtggaccatttgaggagttcgagatcagcctggccaacatggtgaaactccgtctctactaaaaatacaaaaaattagctgggcgtggtggcgcacacctgcagtcccaactactcagaaggctgaggcagaagaattgcgtgaacccagaagggaaaggttgcagtgaaccgagattgtgccactgcactccagcctgggtgacagagtgagactccatctcaaaaaaaaaaaaaaaaaaaaaaaaaagcctaataatgggatattatgaacaggcttatgttaatacatttgaaaactagataaagcagactaattccttgaaagacacaaattaccaaagtttgttcaagaagaaagagataatcctatttaaagaaattgtaggttaaaaaaaacccagaacagatggcttcactggtgaattcttttaaatatttaagaaggctatattaccaattttatacaaactcctccagaaaactcaagatgaggaaacacttcccaactcattctatgaggccagcattaccctgataccaaacccaaagacatcacaagagagctacagactaatatccaccatggaatatagacatcctcaacaaattaacagcaaatctaatccagcagcatgtaagaaatataatactttaggctgggtgtggtagctcacgcctgtaatcctagctctttgggaggcagaggagggcagatcacttgaggtcaggagttagagaccagcttgaccaacatggagaaaccctgtctctactaaaaatataaaataagccagatatggtggcgcatgcctgaaatcctagctactcgggaggctgaggtggagaactgcttgaacccgggaggcggaggttgcggtgaaccgagatcgtgccattgcactccagcctgggcaataagagtgaaacgctgtctaaaaaaaaaaaaaagaaaaatatactacatcgtgaccaaatgcatttatacttggaatgcaaagtgtatttaacattttaaaatcaatcaatgtaattaaacacatcaacagmctgaagaagaaaaaaaaccatacagtcatctcaattgatacagaaaaagtctatgacaaaatgtgttatctgtttattataaaaactaagatttcattataaaatcttagcaaactagatatagaagagaattaacttgataaagggtgtctacaaaaataccgagagctaacatcacatttgattgtgaatgaacaagttttcaccaaagaaggtatatggatgataaataaacatatggaaagagtagggaaatgcaaattaaaaccacaatgagatattattattagaatggccaaaacaacaacaacctgacaataacacctgctggtaaggatgtgtagctactggaactcttagacattgctgttgggagcgcgaaatgatacaggcactttggaaacagtttggcagtttcttacaaaagtaaatatacacttaccatatgacccagcaatccttatccctaggcatttctccaagagaaatgaaaacaagcattcataaaaaacctgtatgtaactgtttgcaacctgtagcactttcattcgcaattgctaaaaacttgaaacaatctaaacatccttcaaatggtgaacgggtaaaacaaaaacaaaccataatatgtccatgctatrgaatgctactcagcaataaaaagcaatgaaaagaaacgaactactgacacatgcaatagtacaaatgaatctcaaacgcattatgtgatgggaaagaagtcagactgagaaggccatatactatataattctgtttataggacatcctggaaaaggcaaaattaatgagattaaaaaacagatcaggagttgccaaggacaggggttggggagaagaactgacaaaaatgggcatgggtaaattttggtaggtgaaggaactggtctataacctgcagtggtggttacacatgatgatattcttttaccaaaacttgcagaactgccgggcacggcagctcacgcctgtaatcccagcactttgggaggccgaggcgggcggatcatgaggtcaggagatcgagaccatcctggctaacacagtgaaaccccgtctctactaaaaatacaaaaattagccgggcgtggtggcgggcgcctgtggtcccagctactcaggaggctgaggcaggagaatggcgtgaacccgggaggtggagcttgcagcgagcccagactgcaccactgtactccagcctgggcaacggcacaagactccgtctcaaaaaaaaaaaaaaaaaaaaaaatttgtagaactgtacattaaaaagggtgaattttactgaatatagattatacctcttacatatataaattaataaaaagaaaaaattattaagcacctgctatgtatcatggctacataccagatatataaacttaaaaatataatccctccctttaaggagctcagggataaataataatagtaatgaccattatcattaataatattagtagttaacacttaaatagggtttatcatatggcatacattgttctaagtatgtcatacatattaactcacgtgatcctgtaacaaccccatgaggataggtagttttttcttatttcctattttagctaaagagagactgagaaactgcccatggtcacacagcaagaaagtatagaacccaggtgcaaagccaggcaacctggcttctatctcaatcctttgaaattcttgcctctatttattatgaaaaacaagttatccaaaattatatggcaattagtggcaaagttaaattttaaagtcattttattccgtcttccttctgtaggctccccttgctaattggaatgaggtagtatgaaagagaaaaaaaaatacagtaacgtagtttttttttctttcttttttttttttttaaagtatagtggtgatcattcttagcatttcttttytggtgaagtttcctgtttggtttttaacctaaagaagaggctaggttgggagtagtggctcacatctgtaatcccagcactttgggaggctgaggcaggtggatcacctgaggtcaggagttcaagactggcctagccaacatggtgaaaccctgtttctactaaaaatacaaaaattagtcgggcatggtggtgggcgctgtaatcccagctacttgggaggctgaggcaggataatcacttgaacccgggaggcagaaattgcagtgagccgagattgcgccattgcactccggcctgggcgacaagagtgaaactccatctcaaaaaaaaaaaaaaaaaaaaaaaaagaggctgattatccaactgtagctccctcttgggtttccccaaaggatctgaaatgacctgacaggaaggcaatactacacctcagagaaaaggagggagggagagaagagaatagatgtctattgagattcggagagaggacaaccagttttccccttcttttaaggtggcaagcagcaaactctgtgtttaaataactattgacaatgcaaacaaaaacaaaacaaaaaacaccaaaaaacaaacaaaaacctctcgagaaacttttattggcaaaaccaaagggtaagaaaagcaagggaaaatataaagggagggccaagcatagcctgggactactgggatgctgtccattttctatttcttgtatttatttatttatttttctctttcaatgactctgttcattttttatttctggatacaggtggtggtctgaaggtgtgttcactttgcaagaattcaaagggttgcagtgcactttgctgtacacaaatggtactatgtgacacaattgtggaagggggaattatgcccaaaagcccacccagatctaattggttacttgctccattaagacacgagtagatattagatattaatatacagagatatttaaaaactaatcttagatttcacattagtgttcagaaatgagcagtttcatttactggtgtttgtaaggaagacataaaagatcctttgatctaaaaagtaatgatctccagaaagaaactctgagtgctctaaagaatatatgaattctcctctgtcccaacacaatgacatactgtgcaaagtccatggaaatgagggagtagctggagcccaggcagaactgaggcacacctcctcgggttattctgccttttctgagcaaagagaacagagttgttaactcttctctagagagcacaaggccaaatgacaccttagggaaaggggaaaagatcaatgtgtcagatccagaatttgagttgatgctgttttctgttccaaagaaaagcaggcagaatggcagcaacaattccaaaccttttattttctatgaagagtattcagctagtcggtggttctcaagcctagacccatactagaatcacctgggggagattttaaaacattctgatttaatgagtctaggttgggagactttttaaaaactttccttaccttactgattctaatgtgtgcccagggttgaatactaatgttagctattattagatctacctccactttctgttcttccttacaatacttctgtgttcttatacttcagctaattaaattatgrccgttctaatttacaggattctttacctgtctaggtactaattattagcacctcttcatataatacaagcaagcctgaaaagcctggttacatttttcaggaaaaatcaayatctgyatctaagagagggaagggtggggaaaatggagaagaaaaagatattaagatgggcaagtcctggtggcaagacaagcagatgacattacagacaatggacatcaaactgctgccaagctaatttagattgtaaaaacagctccatagtcaataacatgagtgatcttaaatatgcacaattaagctacttctcctttaatactatctctgttttgcttggtaaacaagcgtcagaggaagataaaggagcttttcaaaggagcagggatgcatttcaatacttaggccttttctaaacactggagtcttacatagatataatgtgtcagttaccttgtatcctagcaacgtctcctactaagggagactatgtgattccaaacagggccttcccttaatgttcaaacataagtcgtgagggagcctcactctggggaaacttgcaatactcaaagaaattttacatgagaaaagtgtgtgctacagcactgagtttctttctacccaactaaaggagtgagacaggcaggaggcacttcttcctctaaagtttcatctgacttacttgttttttacccccgaagcttcagtgtaaccatgactccatacagctggggctccggaagcgtctcctgtagaaggctgatcaatcttgaaacagcggatattactaacaagagaaacagggagggaacaggaatcattaaaaccaaatgtgtgcaaattgctacctttatccragaaataaaaaatacacctgttaaacactctgtacttaccatttcttactgcgtttaatgtgtctgaaatacttatcagcaacaagaaccagctactcgttgtaatgaaaactgaggggcatatatacagagcacgaaaattagttttaatgagcatcgtaaagcagctattagagactttcacacattccactttagatgactgctctctcctgggaatgacaaggacagctctcagccttggcatgagaaaacaaaacttaagtaataggatgggtgtattcttacaccatgaatactcagaaagaacaacaacaaaacacctaagccacaattatactgcatttagatgatgtgagagaattctgcaatattcatctccaaatccaatttctgtccatataacccctccaaatattatcatggacttgcagttccctggagcttccaatactctcctcacgggtatagccaagtatgtatgctaagactaatatcataaaataaaacatatatgtaaaattacaaagcaaatgaagggtatttaataaattacaagttaactgtatgtatttaaactgggagatttcttacctctcctcagccctcatatgccataattgatccaacaggacccaaaacagaaatactaaagggacaaattctcaaatagcatttcttaaaaatcagccttgccaggcgcggtggctcacgcctgtaatcccagcactttgggaggccaaggcgggcggatcacctgaggtcgggagttcgagatcagcctgaccaacatggagaaaccctgtctctactaaaaatacaaaaaattagctgggcatggtggtgcatgcctgtaactccagctactcgggaggctgagacaggaggatcacttgaactcgggaggtggaggttgcggtgagccaagattgtgccactgcactccagcctgggcaacaagagcgaaactctgtctcaaaaaataaataacataacacataacataacataacataaaagaacataaaataaaataaaataaaatcagcctctagaaagcattctgtgcccctaaacagggagtcattaacagatgtaaagtagtctgttaaaaggctggctaccacaaggtgaaataagtcctcttacttgtaaattgccactaagtttccccctcattattatttaaacaagggaaaaagtatatgtattatctgctgacaactgaagcaacacctacatagttctggtcatgaccacaagaattaaaattatctgttggtactcattactcccaaatctaacaaatactgtatatccttcctaagaaccagttaaagctctaagaagtaaatcaatatctaacttgtattccctttgtaactagaaataactgatggcaatttttctgaaatttaaaaatatatggttaaagaaaagtttctactctcaattactagcaaacatttactttccatcttgtcttgaaaaacataaatcatagtgtcaatagaaaatccccaaatcaagttaataccttgttttacaataaggctggagctaaatctttttttcaaagttttcaattctataaataaaagaggcattaacaaaaaaaaggacagtcctccattatttgctctccatatgacctggtactccattttatccatctaaaacagtcagcaatacaataggtttcttaagacatatcctaaggctcttagataccatcctgaagtctagggaaaagtgaaggctcatttttaaaggcatttataatttttacagaacacaaagtcttcagagaaataattccatttcctagcctgattattaaaggaaaaaaaaaataactcttaactgccccctctccccagcacacaaataattctttctagtgaagcagcaatttctcttctctacctagctgaacacagtgtggctgagcagctatctgaagtgaaatgaatgctgactcttgtatatctttattttttattttttgagacggagtttcgctcttgctgcccaggctggagtacaatagcgtaacacggctcactgcaacctccgcccccaggttcaagtgactctcctgcctcagcctcctgagtagctgggattgcaggcatgcgtcacctcgcccgccaatttttttgtatttagtagagacgggttttcatcatgttggtcaggctggttgcaaactcctgacctcaggtgatctacccacctcggcctcccaaagtgctgggattacaggcgtgagccaccacacccggccatcttgtatatctttaaatgagtcagagttctgtgaaccacagctcaatctcacagaagagtcctcatatgcacttaatcggctcacataaaacaaaccaaccctctaaaagtgcaaataatatacggaaaatcttccaagtcattaagaatccacaaccttccagatgttaaacagaaggtaacattttaagagtattatgattttttgctataggaaactttggtctgagtaagtgaatattttaaaaagcttgatacgtacgacaactgcttttaagaagagtgtaataccaaattatactccttcagcagcaccaatttgaggggggaaatgttattcaaatattttattttgtatttgcttgatatacttataagtttgaacatcttttcatgtaactatttgtactgcatctgttaaatgttaatgtccttggtttattttgagtacttttcttatcatataagaacattttctagtaagcatattaatgcttttattttttgtatttctcttcctagtttgtcatttgccatttatatctactcttgagagtttctgaaataggaaatagacatttaacacttttatgtataaaaagtatatttacgtgtaaacatatacgacataaatattgaaaccaatctacatgtactgatttcttttcttgtgacttactcccttcatttcttggcctaaaaagtctttttctaacttgtgaagatattcatatgatttattacttttaaaaatcatttaattttacagattcaactatttcagctggattttggtgtgatataagaatgcaactttaatttttctctaagtggctacttccatttattaacaaattttggtgcaattatttttaaattttatttgtaaaaaaatgctcaaaaatttttgtatcctacgtataaaaaatactcaaaagctatctgtttaaagatgatgtattttgataatccatgttttcttgatcttaaaaagtaccttaaagatcacgtaggccattttttttctcatcttataggtgtggacagatggaggggtttaggccgaggtttcatacatgtgatcaacaatggagagaacctcggtctctacgccttcctcaggacactcaggcagtgtttttcaactatgtatcaaaattaattttctcatcaagtactaaaatgccaacaaattaggcactaattaggccaattctatccaggaatcactttaagtgcttttcaaactttggtttgcactacagcctaggatagtattaacggaccagtcaccaaaattctaccgttcttttctgattctcttaagataatggaagatgactttcggcaacaaatattccaacattgaataaacatatatggcatgcataatgactaatgtatgacaatgtttaaaactgctactgatataccccaaaaaattctgaaaattcagaaaagtttaaagaagaaaataaacactacccataatactattatccagagaataacaccactttaactctttttatatatcctttcaggcattttctagatgtgtgtatgcatacacatgtacatatacccaatgcacacaaatttataatgcaaaaattgaattatactataaaacttcattgtgaattttattaatattttcacttaatatactgtaaagatcttttgagttagcaatatagctctaaataattttaaatggctttgtaatattcaattgtggaacattatttaattcttaatagacatttagagttccatgatgaacattctcattaagacatctttcctactgcagacctttaaggttttacatagaaaactccaaccactaattcttttatcaatatcaagaatgaaacagcatcaatgacctctttcccaaaccgtgaagatctaactattggtaggatctaactactccgcattcttggttttatttaaataacctggatttcagcgctacactgttaattttccctacatcatccatctcttttaaaatccttccttaatatttgcattaactgtcacaaccacgttatcagtgactactgagatttaagttacatcttggttgttcattgcttccctgcatcttgtatatcctgttgtgtgtgttaacacagctaacaagtcaatgatgcttcatattttgtttcccattttcactaagatatgaatcccattgccagtggacaatgatggggatacagtgctttacagaatacttacttcagtagttccagggttttgtgatcaaggacaaggcgcgggtttccagtcaggtctagctcctgcagtttgggaggcaggttttctggtaatgtgacttcacttagctcattacagctcaggtccacacactgaaaaaagaacaagtgcaaacaagaaagagatggtctagagaagctcttcagggaattctatactcctactctttgcatgcaaatcagtctgaccattcattataatacactagacaaatgtggaaaaggaggcttatctgttactttgccataaacatttaaaatagattttgctaaatgcaaaaaaaattttttaattttctttgaataacagaaaatccatgttctttattcttcctatatttttcacttaattttatctccacgtttaaaattaagcattaactaaaaaatcctaatagattttcttattgctcacaaaatctccgtgccatgagaactatagctcaaacattaaaatgaactttaaaggaatttcttaaaacaaaacaaaaaacaaagaaggctgagtacagaggctcacgcttataatcccagcactttgggaggccgagtagggtggatcacttgaggtcaggggtttgagaccagcctggccaacatggtgaaaccccatctctactaaaaatacaaaaattggccaggtggtggcgcaagcctgtaatcccagctattcaaggtggctgacacatgagaatcacttgaatmcggtaggtgcaccgggcacagtggctcacatctgtaaacccagcactttgggaggcagaggcaggcgtatcacctgaggtcaggagttcgagatcagcctgggcaacacagtgaaacccccatctctactaaaaatacaaaattagccaggcacatgcctgtaatcccagctactagagagggtgaggcaggagaatcgcttgattctgggaggtggaggatgcagtgagccgagatcgcrccattgcactccagcctgtgcaacaagagtaaatctccatctcaccaaaaaaaaaaaaataagaatccgggaggtgcaggttgcagagaccacaccactgcattctggcctgggcgacagagcaagaccctgtctcaaaaaaaacaaaacaaaacagaaaacaaacaaacaaacaaaaaacaaagaaaagaacatgtaaaatgaggaaaaggcaggtaacacacactcaaaatgagaagatatttcaaaagaaactgaataagaaattggcaaaagcaagatgagcaggtaagcctgcctaatctgtgtcaaaaaaaaaaaggggctgagtcaagtatggatcctaccctcaaggcatcaacatctggactctccaacaggtcctccctaatttaacttgaaagaaaaatcacaaaagggtcatgttggttacaaaaaaatcaggttttacctgtaagtagaaattatagctcctttctcacaaaactgatgtaaagcttaaataaggtgtactgtaaaaagaggggctgcccttgtgttcagggagcagggaacctaggtggagaaggctcagcatacacaagagaaacggagtggtcagcgctctagatacaacaatgcagaatatatatagtatatagtatggggtggagagcattcaattatctggctgaattagtaccttattgtaagtttcaaaagtgcttacagaaacgatcagaggggaattgttttgttctctcttcagtcctttaaaaaaagggaggagggagattatactcaagaacttcaggatcttaaaagtggacaaaatcttccttttatttggaaaaattctcaaagaatttaaatctagtagggattggggaagggtagagattgggtaaaatgaaaacctgtatttttgggtaaatatattttcaataggcttcaaacaacacaatgctctcacacaaaatgtttcatacagttgcttccaaatagtagcaatgaaaaaaattatattgccattctaaataatcatattttattatgagagcattataaccacattatccacaaaaagctgagcaaaaagaaaagctcagaaaaatatacccttaaatctaccaccctaacacacccagggttagcattctgtttttttttccttatagtcttattcatatatattttttaaaagccttaaaaatctcaaacataggtgcaatttcattacatttcatttactcttctatcactctactgcaaccattttccccatcttcattcccatctgctatggtctgaatgtttgtcccccaacaaattttcatcatatgctgaaacttaatccccaacgtgatagtattaagaagtggggcctttgggaacagatgaggtcataagggctttgccctcatgcatgggattagtggccttataaaacaggcccagtsagcttgttcactctttgcacctgacaagcatacatggaaggaactatctatgagaaatggggcctcatcagaccaaatctgctggtaccttcatcttggacttcccagcctctagaactgcgagcaagaaatttctgttgttaataaattatccagtctaaggcatgttgttatagcagcctgaatgccctaatataccaccacctttaatagccccatactaattctagtagatgtacattaatttacttaacctaaatattggagaaaacagtcatctcttttttgctttgttttgtttttttcaattataaataatggttacatcaacagtcaaccagagtttaatgaaaaactgatacccgataatactgggtaataatgggacatgctaccaacagagtcagtacacatcagcatagcaggacaacaaatggggatatacacaatctactggacactgatgggacaggaaataaagagctaataagtgtgagtaatttaggatgcaagtagttgacaacaaaattcaggggtcagaaaatgcctttggtcaaagattaaaggcattctgcagaaatattgaattttatgaaattggtaaaaattttttctacagatataaactagctcattctctaaattatcaaattatgaaatgagttcagtagggtaactaattacttatgaagataatgctgcaggctgtaatgcagaccttcttagagatgatgttcctgtgcctcccctctgcccaggactgtttgctccccaaggctcctgtgacagagtctctgattcactgcagcaggttcccttccgtcgagctccactaccctggactgacctgcatcccatttcccccggagggctctggctgcaccagaaatttgcttttggtcttgcttccctcaatgtactccttgtatgctgtcaggatggtttctcagtgtggtttactccacctgctcacactccagcttcagtccgtcagcctgctcccaggtgtccttcaacccgacaccaaactcctcagaatgtccaacaaggcatccccaactttgcacactggcttcctcacactccatgttccacccatgccagagtgcctgcagctcatgcatgtgacatgctttcatctgtctgtgccttaacacatgcttctctctgtgcttggaactcttttcttcatgcttttcttgctttttatctggtgcaatatgcctgattccttttaagactcaactcaatgccaactctactacaacctgtttcaatttggtgtcccttgttataattatctgcttacttatttcttccatgagactatggcctcctagagagcagggattgctgctgtttctccccggatatcctaagcgcagtgcactggaaagtgtagatgttcaacaaatggtttcattaaaaggatgaacaaatgattgcctggcacatgacaatcattttctcagtgagtttatgaaggactcttgtaaggtgtttcagtaattaaatctgctaggatgggaactgagataccagtgcttaggttaaattcagcatagaatagatagcattttaatgcaattttaatacattttaaatatcatagtttatttctacataagaatgcaaccattttctttaatggcagataagcaaaaacacccttttatacttctgcacacaggaaggaggttcgttcacagaaattatagaaagttgaaaaaaaaattacaggatgttggtatctggtgctgctctcccagtgttaacacagtgagcaacacgcttagaagcactctgtcatgttctttcaatagtcctcaacaaaggctgactgctgaggtactccacaaacacttgttggctgaatcataatggttaccactaagcaaatagaaaatatttgagtgaaactggaataaaaaaagaccctttatattgttaatatatgtacctctatggttagtgtactacaactttcttaaaaatatattcaatagaatgttaaatctggctaaaacacgactaaaagaaaattatctttccctctttcaggcccattctagaatatagctaacaaaaattactttgttataatcaaaattctggtaagaatgcccaaaaaattatgcaaccctcagaaaaagtgagataactcatagctgagaaggaactcttgatttagaggaaaatcattacaaacacatttagataagagcataaaaaagtcattatatcttaaagaaaaagaaattcaacttgatgtatagtttaagtgtaactatcacaaaagctgcatggagcctgtctttattatgttttcctcagaacattaccaaagaaacaggcatatcaatgttcatagcaaagtattatatatcatctgccaaatagctgcctgtactgccctgaaatggcaacttaacctaccggctgctagattctgtaacaccctacttccttccttcctgcagactatccccagtccaccacctccaccgtgctccccagtggcacagtcagttccaaaaatgaggatcccaatcacagtctggatttccttgcccttgcaaggtaaaagctgctagtgtataacatatttccctactgacttcataagaagtaaataaatgcaagtattctttcaaaagaaaatgtattaaggacctacaaatcggcaggcaataagccatcatcagggacatatggagatggcagacacagtccctgcccttgaggaactcccaagatagtggggggaaataaacaatacacctttagctggtatgatcaacgatayggcagaagtatgcacaggtcatagcagcccagggacagataacaagaccccagagaggcctttccagagaagatttttgtgcagaatcaaagttaatcaggcatgtgagaacaggtggacatctagagagagctaatagcaggtacagcaggaaggagacaagaataacgtttgtgtggcatatcaggaaactcactatgagcagttgctgaggctggagactattgggccccagagcagaagataaggctgggcaggcagagggatcagataatgaactgtggatcctatagatcgtgtctcatacagaagtagtctacactgcctccctttcttatgatgctataggaactagaacattttagcttaatagtaaaataaatatgcacacatatgtactatttctcaatatacaacttttagtcaaattctcttaaactactatacattcctggtgttataaaaggctaagtgatcactaacgtgggatgttgatacaactaagtaggtttattaactgaatgagtcagtctgaactcaacttttaccctaaacacagacctgagagtcacagtgtagtactattattctacataaaattgtatttatggctgtgtgcagtggctcacgtctgtaattccagcactttgggagacygttgtggaaggattgcttgaggccaggagttcgagatccacctgggtaatatagcaagaccatctccgcataaattttaagaaattagccaggctcctgagcacctggagtctcagctactcaggaagccgaggtgggagcttcctgtgagccaaggaagttgaggctgcagtgagttatgattgcaccactgcactccggcatgcgcaacagagcaagaccctcttttttaaaaaaatcatatttgtatataattactgagaaatgtgcattaatgtttaaacttcctcaccttatagggagctgcaaagaaagacctttaatcttgtataaagcattccttttaaatttacatacagtgtctccatgattttctcaactgcattttagatttgggaagcctagaagaaaccttgggaaaccttaaaattggcaagaatttgaggtgataaaaatgacaagcagggtaacaatccttagcattctgtttgttcaaatacagaatttcctcaaacactaaaactaagttatctgcaaattttgactttaagaaaatgtatcctgtataaactgaacaatttctttacatcatcccttctttttttatccccaaagagacaaggtcttgccatgttgcgcaggctggtcttgaactcctggccttaagcaatcctccaacctcagccacccaaagtgttggaattacaggcatgagccaccgtgcctagcccaccagcacttcttaaaattgattatggccrggcgcggtggctcacgcctgtaatcccagcactttgggaggccgaggcgggtggatcaygaggtcaggagatcgagaccatcctggctaacatggcaaaaccccgtctctactaaaaaaaaatacaaaaaattagctgggtgaggtggtgggcacctgtagtcccagctactcgggaggctgaggcaggagaatggcgtgaacccgggaggcagagcttgcagtgagccaagatcgcgccattgcactcgagcctgggcgacagcaagactccgtctcaaaaaaaaaaaaaaaaaaaaaattaattatgtgtgcccttgggggtactcaatggtatactacaaagttacaggatgcctggcacatgcatctgggggctttagttttactcagattgagaagggaaagagccattatttttacattaaaaaaaagagaaatgataaaaagtagaacataaaatgagcatgatttttagactgaaaaagagacttgaaaagaaatttacaagtgattccaggcatctcccagatttctgggtgcgtgagtgcacttccctttgccctcaggatctgaagagcaccacagtaaccacctcacagatcacttcttctgaggactgagtcatggtgctcctttctccagaagcctctctaaagagatgccttctaaaatgcatgagttcatgaaggactaattgttcatctttatagatacataagctattccataaaatgtatgcaatattttgttagaatgggcatggctttgaatttagaaagatctgctgaaaccagagttaaaaacaaacacacacaaaactagtctgggttggccaggcgcggtggctcacgcctgtaatcccagcactttgggaggacgaggcgggcggatcacgaggtcaggaggttgagaccatcctggctaacacagtgaaaccctgtctctactaaaaatacaaaaaaatagccgggcgtggtggcgggcacctgtagtcccagctacttgggaggctgaggtgggagaatggcgtgaacctgggaggcggaacttgcrgtgaacaaagatcgtgccactgcactccagcctgggcaacagagcgagagagactccaactcaaaaaaaaaaaaaactagtctgggttaactcattacaccaattttgaaagacagagagaatatgcagtcttaacttcctgctagtctgttcctggtgaggctgggtgcagagtggcttcaatggccactttccagtagacactgcttgcttcctctttccttagtccttgtatcgagccttgtcccaaacaggaattgacattagattccgcaacggttggaaaatttcctcagtaactattacttaacttgattccagcaccataataatgactgctcctggtttcaggttttggatatgcattatgccaagctgacgtttttacgtctattakgtcaactacgccacccaactaaagcctaaacttggttcctgacctgtcttcatatccatttcctacttccccaagaatcaacccactttcttccatccattctacccagccatttccccatgttctttgtgtctttgtgattgagctgatattctctatttcattttactttagagacaagaacaacaacaaacagggcttgctggaatccagccaagcgaagtctggctacatggtgactatgggattgtggttttctctctagctgattgagagctgatctatattcagtttattttttaaacttcctatagccattgtcctcaagagtatagcatattaaaactacttcatactccatttcccagttaaggtaacacagattttagatacaagttcactcaacttagccaagtagtttattactgcatggaacaaacatgaaaataatcttctaaagataattaaaacatctaaaaagatgctgttcttagaatcagtaagccacaggaacatggaaatttgacaaagaagttgctgacatgatgtttaaatcccaaattacaaacttcattcaccgcaggtatcaacacttatttcacctgcttaaaatacacttcaaaaamgggttagaacacctggctccagcctgggtgacagagaacctatgtcaaaaaaagcgggggaagggtttagaataggtcactattaactaatagcttggtttttgttgcaaaattactatattaccaatgtgactgctatgcagttcagtggaaggagaaacaagtgccatatccaacctctgcttctgaggttcctcagccatgagcagccttagcatggccttaggtccaggtccagccaaaccaagtctggcgtctgtgtgactcagatcttgttttccttactagatgatcaagagctaatctgtatccagagggaggcctgtctgtttcagaaccaaaagagaacacaatctgctccaagcaaaactggactggtggtaggggtttgaaagatcaatgcgaaagggctaaacaaaggtgaggataataacactaatgatccactcaggctcactggaaaattctgaaaaactcattttayttttcckactaataacttacataacctccctatccaaatacagaaattaacacctgatgatcactttacagatctcattagatattatcaaaatgaaaaaaatgccagagctcaattttatccaagattagatggtgcaaatagtctgtttaaggtgtacatgaataattaattattcaggtgttttaaaaacatattttagcatacatctcagtacggagatttgtttgctcttttaaacaataactgtttttaaaactttggtaacaaagctatgaataatcactttcttttaatgtctgaaaagatagcaatgcttggtgaaactagctagttaaatacaccatgatcttatcttttctgaaatgttatctgctaagtttttaaaattgcaatgatcttaatacctttatatgctttacaagtaacacctactgcactttattttcaagaaacagtgttaatgtaatctagagttattaactcaataataaaattttaatacaggttggaatatatcaccgtagaaatgaaattacttcttttacattaaaaatatgcttagtttacataaaatacataaaaataggcacactttacaatgaagactttcataggtatatttatcatttaagatacgcacaatttttacaagattttcttttagatattcaaatatacatacttatattgcaacttaaaatattctcatatgacacaaaaatatcaattcagagttctgaaacaatataactactatctttttcaagaatactatctgtccagggatgaaacatttacatgtttgtacataaaggatacttgatattgctcagtgcacacgtaccctaaaacttaaagtataaaaaaaaaaaaaatcccaacaacaaaacttctatctactggtaatggaggagctcagcctgaaagaatggatattgttaacataagaaaaatgctaaggtgtaatagctggggggaaaatcaaccaaagagcaaaaaaatggaaaccatttaaaaatatgggaagtaaaattgaaaaggagttgtaaagcaggtacagagagaagacaacaggggaaggaattcaatagcaacaaaggtactgattctgtaatccaggaatccaagcaagagtctaggagaggattagttttcatacagcaaaatttgtgttttgcaaaatctagttataatctaaaaacatttacatttcttttttttttgagatgaagtctcactctgtcacccaggctggagtgtattggtgtgatctcggctcactgtagcttccccctctcgggttcaagtgattctcctgcctcagcctcccaagtagctgggactacaggaaygtgccaccacacctggctaatttttgtatttttagtagagacagtgtttcaccatattggtgaggctggtatcaaaagcctgacctcaggtgatccacctgcctcagtctcccaaggagctgccgygcctggcctgaatttctatttgtattttatttatttatttttttgagatggaattttgctcttgttgcccaggctggagtgcagtggcgcaatctcggctcactgcaacctctgccttcgggttcaagtgattctcctgcctcagcttcctggatagctgggattacaggtgccaaccaccatgccyggcttatttttgtatttttagtagagacagagtttcaccatgttggccaggctggtctcgaactcctgacctcatgatccacctgcctcagcctcccaaagtgctgggattacaggcgtgagccaccaagccaggcctctatttgtattttaaaccaaatacttaaacaaacaaagaaccccaaaacaagaatctaaatctacatttaagagtttataacattaaaagacagatacagacactaagaccagcaaataggaggtttaatcttgagactctcactttctcttgtgctagaatttcacctgcaccacacatagagaccagtttaacaacccccagtaaaagatggcacagcacagccactgtgtcaagtaatgggcagctgaggaaaccctggaaggtctagctgacaacatctttcctgtgctgaacggcaaataaacatttgcttaagtaataaatttcttggattttgttgagcttcagccaaaatagttgctctatataatcaacatcacatatgaaccacattgagggcatgtgttgattaataatggctaacatttagggagttcttcctatgtgacactcctatttcaaatgctttacatgtattatttcatttcatctccataacaatactataaaggaagtaccaattcttttctttctttaacatacgaggaaacagagcagtgaattttcagctgggatccaactggaggtctgtctcccttcagagcacggctcttcctcaatgtgaaagttactatacagaaagtaaaaattctggaaatttttgttgttgttgttgttgtttgttttttgagacggagtctcgcntctngttnngcccaggctggagcgcagtggcacgatctcggctcactgcaagctctgcctcccaggttcatgacattctcctgcctcagcctcccgagtagctgggactacaggcacgagccaccatgcccggctaattttttctatttttagtagagacagggtnttcaccgtgttagccaggatggtctcgatctcctgacctcatgatccgcctgccttggcctcccaaagtgctgggattaccggcgtgagccaccgcgcccagccaaattctggaaatttataacaaacatcttaaaatgccactgtgatgtatgagacagtgttcttaaagcccaaagtaaaacattttgtggcttaaagcatacgtgcacatgcgtgcgcacacacacacacacaaacaaaatggcttgtacacatctcaaccatataaatgtgtaaaaactgttgtgataaaaagttatgcaagccggccgggcatggtggctcatgcttgtaatcccagcactttgggaggccgaggtgggtggatcaccttgaggtcaggagttcaagaccagcctggccaacatggtgaaaccctgtctctacaaaaaaatacaaaagttagctgggcatggtggcaggcgcctgtaatcccagctagtcgggaggctgcggcgagcgaatcgcttgaacccggaagacagagagaggttgcagtgagccaagattgcaccattgcactccagcctgggcaacaagagtgaaactccatctcaaaaacaaaacaaaaaaaagttatgcaagccatttaaaatgtcttcaaatgtctatttgctttcttaatctaaaacacaaggtttatatcagcaagtgcctggaaagtgaagaatggctaagttggactgctcttgttccctgttaggagattagaatatgctccaagtctgtaaccaccaaattatttttcattaagcataaaatcgattactagaaatgctaagatacaaatgaaaaactacattgtatataaagaactttttacttctgtaccatttccctgccagaaaagaaacaaaataggaacacatggttgttacatggctttcattctagtgaactggtttcatcccatgaatctacctcaagtcagcagtcaggatttgcagactacctctgctaccaatttgctgtcttaatttacacagattgcttcacttttcagcacctcagtgtccttacttatcaaatgacaataatatctgctctgccaatttcattccgttgaaatcaatgtttggtgacagcaatgatgctctgtctatatagggaattaccattagtgggctaatatggtggggtgtgctatttaactgggtgagttggtagggagcgatgtgtagtggtactgttaacyttttcaaactgcgattacaccagcgtcagcctttgagcctcataaccaccctggaaataagtggaacaactattaacagataaagaagtatagggtggctatgtgggtagcctcatgtcatacagtaagtgagggactcagcctagaaatccaattttcccaaaacctgctccagtgttttgctttgktttttaactctgccgactcaacggtgtagcccattggttaggaaggaggaagtaagggctaatgggggccttcattctgaataaatccaacaaagatgcaaacgtcctgagttgatgagttaggaagtcaactttctttgccgacctgmagcttagagtttatgaaatgaaaccacataccttgatctctgggagctgcataacttcgggaaagacctcgatgcagttggagtgagcaatcacggtgtgcatgcgcctgcaattcatgatcgttgttgggatggctttcagcttattcccactgagatcaatttcttcaagttcctccagtttcgccattttactaaaaaaagagaaaataaagcaatttaaaagaaaataatataggacgagaatcaaaggatgaattaaattgctatgactttaaggattcatttgtaacagtcatttttacaaacaagaccattttttcactatcattttggagtactgaaatattttaacacctcctttctcactacagaacaaaaactattcaactcttcaaattgtcaacaagaaggaaaatggatgcccttttcctcctaaaagtctatgtggaaattaagttaccctggcaataatcatgttactgtatagcttggtctgaacactaatgaaaacactatttaaatgggtcaaaagccagcactaatacaataaaactgccttaaaagagctcagagagtatgatttctttgtagtggcactgaaaactcaagggggaggtagagaacaggtctatagttcrtattaagataagctttttcttcaaccctcactcccccaactcctctgacatcactgatgaatacaaagtggtggtaaggagcaaggggtgtgttaaaagcccatttggatcacctcttggacttctggcagagcccaaattcacaccagggccaaaagacatttatctcaattgttgctaaacatctaccaagaaggaatctctccaaccttatcttaataatatgttctaatgtaattaatttaatacttctgtttaagaatgtcttttattgttcaatcctcctcatctataatcttcatcaataattacaataaccaactaaagaaaaattccagaatcagggtttcttgcattctttataaatttgaaagaaaaaacaatgcctctacctctgcaatcactgtaatagtatctggcacttttttgaccctttttccactcctgctgatgttagactccaagaagcacaggattccccattagtgtgatccagactcataagctgaataatagtttacattttttggtattgtttctacctgttatagtttcatttgtcacaatacacttttaaagaatttaacaaaaaaaaaccactgtattatttttgtcatctttcaaatataaagattatcttgtttatcttgaaaataaatatatgcctaagatacagtaaaaactaagtttttatcttatgaagtcagaccttttaatatcatatacatccagtgtggtatcagaatagactacaaacaatatgtacacagactatgaagtaatccatctatgatagcccgaatttctgagaatattatttaaatatgttatcatcatattttgaaaaaaatatagtgatacggtttggattatttgtcccctccaaatctcatgttgaaacgtgattcccagtgtcagaggtggggcccggtgggaggtgttttggtcatgggggcagataccacatgaatggcttgatgcccttcccatggtaatcagagaattcacacgctgtgcattcacgcaagaccctggcatctcttttgccccctctctcaccatgtgacacaatggctccccttcaccttctgccatgattgtaagcttcctgaagactcaccagaagcagatgccagcccttgtgtgccttgaaactaatgggtaatggtgcatgaaaaatgattaaaagcacagaaaacaggcccccaaaagaaaaagttaaagaaatttccaactcgccacataaaaagaaggtggcaaaagatgtgaagacaaaatgactagatggtggtcccgttctttaattcagcaaccatttaagtgtgggccttgtgtgagatatgaggctgagggatacagcaaggtcacagacccagctcttaaggtgctctggtttgcaggggagctactgagccacatcacaaccacagggagacagaattcattcctagatggatttttttacaaggtgtgttaaaagtttctctgcacttagggtgggtgattacacctggcacgggtcactgggggtatatcctcagaattagagctgatgatcctttcctctgcagggtttagacattcatcatctgaaagaagacaatgagctctttcagataggttgctgttatgtgattatcatggttttttccaaaaatatcatttccccattccatagtgaagtaaaagtagatggaagtaagcataaaatagtttaattattaatatcaaatgaggaggaaagtaaatatttcattacaccaaaaacagagcaatactttaagtcaacatatacacgggccttccttcttcagcaagggctcgaacagactggtagccctgaaggcagcagagggaagctatgatagtgttttgatttggccccaatgctgagttgcagttaccaagcagaaaccagaagggttagtgtttgtttctttgatgcgtgggtgtgtgttcaagccctaacttgttagatggataaaagccaatgaaatggaaacacggtaaatcctcacggcaggctcagcacgcagattcactcaaagctagatataatgtcaccgctcaccgaaaattagaaattaaagtaaaaacaaattaaaaatggactattttgagagccagaatttgcaatgttacagtttctatggtagtagagtctaccactgctctgtacatcatgaatatgaatataaagtttggtagataatgaaggattttcaggttcctggtttacattctaattcccacataccctattaggttaatgtttttggaaactttattatttactttattttttaatagatagggtctcactatgttgcccaggctggtctcgaattcttcagctcaagtgaccctcccatgtcagcctcccgagtagctgggactacaggcacgcactgccacacctggctctaggataatggttttttaaaaaattaatctgactggttaaaaagaagtaaaagaaaaaacatacctgctaaacaacacattttatttcaaaatcttaagaacattcttgtgattaggtctttggacacatatgaagaaaaccaatctacttctctttagggaaatgtcatcatagcttacataaaggaaactgtgaagggagcaggaacaagcaaacaaacttgacatcacctgggaaataaatatttcagccttcacctttctatgaatacactttgagaaatgcaattcagaacgcagctttacaactgtcctttaccttgctggaaaactctgaagtcggttataggccatgtgaaggatcttcaaatgggggtgtcccgttaacaagggcacacatttgtctgtgaggctgttatttgtcaaatacaactcttgtaagatactgtttgtctcttcggaaagcgtggctggaggaaggctttccagtttgttcgcagaggcgttcaggaatctcaggctacaatgacaaaacgcaacaaaatgccattgaaaagtcacaaaaaccctcaagaaacctaaaagctttgataccaggcatattagaagctgggatcagaaacatgaattgaaaagacaagccctggcttcaaggagttcaattagcaagtatttgtatctgtgattcactaactatcatgaccacaatagctatctatatgtattaaacacagagatacaaccaatttttatggaagcacaaaggtaaggggaagcaattatttttatagttggcggggagtggaagagaaagtgatatggtaaagttaatattctgacttaaggaagagaaaaacagtttcctattttgtaatcaaaagtttttgctaaagcaggaggatgccaggagtttgagaccagcctgggcaacaaagcaagatcctgcctctataaaaattaggtgaataaataaataataaataaatggttcttatagtaataaaacaggtattagatcacaatgcaactaaatcacatagtgacttgagtcctcttcagtataaagtccaaagcacattttactggctttcacaagtgcaggagataatttgctctctattaaaacaacataatatgatgtagcaatgagaataaagaactaaaacaacatgtatcaacaggatgaatctcacaaacacataatgaccagaagaagccagatacaagaggagacccactgcatgatcccataactatataaagttcaaagtcaggcaaaattactctgtagtaacagaagtcaggatggcagtaactcttaggtggggagggaaaggaggcagtatccaggagacggcgtgtaacgtttcaaatattgtaatgttctgtttcttagtccaggtgctggttacacaagtgtgctcactttgagacgaagcatcaagggctacacttatgatctggcctcttttctgtatttatattgtacttaaataaattttacattaaaacaaacaaacaagataatatattgctgccacacttttcagatgctagagtgaaaagaggataaaggccaggcgtggtggctcacgcctgtaatcccagcactttgggaggccgaggcaggcggatcacaaggtcaggagatcgagaccatcctggctaacatggtgaaaccctgtttctactaaacatacaaaaaattagccgggtgtggtggcgggcgcctgcagtcccagctactcgggaggctgaggcaggagaatggcgtgaacccaggaggcagagcttgcagtgagcggagatcgcaccactgtactccagcctgggcgacagagcgagattccatctcaaaaaaaaaaaaaaaaaaaaaaaaaaaagaaaagaaagaaaaagaaacgtggataaaatataaagaatggttttataactaagataagtaaaattgcccaaaaaaaaaaaaatcctccacggtgattgtgaaatgtagttaaatgcacattgcaaagctggggaatggcaacaaatccttgctgtgatcaggttccaaatcactccaaagggacggactgtgtcaccctcaagagtcagagatgaccctcctgattcatgacgaatgtccaactgtgcagctgcagcaggtgggaaagagacagtgctcagtacatagcacttgcctacaagagttagaagggtgaaatctcccatgcctccccctggcccccagatcaaccctgttgatgaaccacactattccctcatttcaatcactttggtttgaaactttcaccattcaattcaggactattctgccatctgttaaaaaaaaaaagaataaaatcatccttaaaaagaatacagaataccaggcagttatttttaatcttggagagaaaaaaaaaggctactaggagtcctcaccaggactgtcacttcaagctctcagtccactaatttaaaactcttcaatcttgtacaaccccttcaacacacaagcaccaactccattacttatctgaggaaaagcagcttccccaaaatagaacattttccattaaagaaacacgtattccgttgacattaaaaaaaaaaaaaaggaagttagagaacggctatccagaccataaatagtcacgggaaattatagtcgtgtgtgctacagagaaggaaataaaggtcactcctgcagtttctgaaatggttttgaagtaggaaggaaacaagtttcagcaacatagttgtttaccatcgctgtttagagtatttttatgagtctgtttctttagatcccatttagaccaccttatttcctgttaagaatttctttagtgtagcattagaataaattacaatgtaagaaataaattttattgccctaaaatatcatggactagtgttggctgggaaactatataaaataatttcattaaaatagaattc

SEQ ID NO: 33 - DNA, 154548 bp, Homo sapiens
gaattcattcctagatggatttttttacaaggtgtgttaaaagtttctctgcacttagggtgggtgattacacctggcacgggtcactgggggtatatcctcagaattagagctgatgatcctttcctctgcagggtttagacattcatcatctgaaagaagacaatgagctctttcagataggttgctgttatgtgattatcatggttttttccaaaaatatcatttccccattccatagtgaagtaaaagtagatggaagtaagcataaaatagtttaattattaatatcaaatgaggaggaaagtaaatatttcattacaccaaaaacagagcaatactttaagtcaacatatacacgggccttccttcttcagcaagggctcgaacagactggtagccctgaaggcagcagagggaagctatgatagtgttttgatttggccccaatgctgagttgcagttaccaagcagaaaccagaagggttagtgtttgtttctttgatgcgtgggtgtgtgttcaagccctaacttgttagatggataaaagccaatgaaatggaaacacggtaaatcctcacggcaggctcagcacgcagattcactcaaagctagatataatgtcaccgctcaccgaaaattagaaattaaagtaaaaacaaattaaaaatggactattttgagagccagaatttgcaatgttacagtttctatggtagtagagtctaccactgctctgtacatcatgaatatgaatataaagtttggtagataatgaaggattttcaggttcctggtttacattctaattcccacataccctattaggttaatgtttttggaaactttattatttactttattttttaatagatagggtctcactatgttgcccaggctggtctcgaattcttcagctcaagtgaccctcccatgtcagcctcccgagtagctgggactacaggcacgcactgccacacctggctctaggataatggttttttaaaaaattaatctgactggttaaaaagaagtaaaagaaaaaacatacctgctaaacaacacattttatttcaaaatcttaagaacattcttgtgattaggtctttggacacatatgaagaaaaccaatctacttctctttagggaaatgtcatcatagcttacataaaggaaactgtgaagggagcaggaacaagcaaacaaacttgacatcacctgggaaataaatatttcagccttcacctttctatgaatacactttgagaaatgcaattcagaacgcagctttacaactgtcctttaccttgctggaaaactctgaagtcggttataggccatgtgaaggatcttcaaatgggggtgtcccgttaacaagggcacacatttgtctgtgaggctgttatttgtcaaatacaactcttgtaagatactgtttgtctcttcggaaagcgtggctggaggaaggctttccagtttgttcgcagaggcgttcaggaatctcaggctacaatgacaaaacgcaacaaaatgccattgaaaagtcacaaaaaccctcaagaaacctaaaagctttgataccaggcatattagaagctgggatcagaaacatgaattgaaaagacaagccctggcttcaaggagttcaattagcaagtatttgtatctgtgattcactaactatcatgaccacaatagctatctatatgtattaaacacagagatacaaccaatttttatggaagcacaaaggtaaggggaagcaattatttttatagttggcggggagtggaagagaaagtgatatggtaaagttaatattctgacttaaggaagagaaaaacagtttcctattttgtaatcaaaagtttttgctaaagcaggaggatgccaggagtttgagaccagcctgggcaacaaagcaagatcctgcctctataaaaattaggtgaataaataaataataaataaatggttcttatagtaataaaacaggtattagatcacaatgcaactaaatcacatagtgacttgagtcctcttcagtataaagtccaaagcacattttactggctttcacaagtgcaggagataatttgctctctattaaaacaacataatatgatgtagcaatgagaataaagaactaaaacaacatgtatcaacaggatgaatctcacaaacacataatgaccagaagaagccagatacaagaggagacccactgcatgatcccataactatataaagttcaaagtcaggcaaaattactctgtagtaacagaagtcaggatggcagtaactcttaggtggggagggaaaggaggcagtatccaggagacggcgtgtaacgtttcaaatattgtaatgttctgtttcttagtccaggtgctggttacacaagtgtgctcactttgagacgaagcatcaagggctacacttatgatctggcctcttttctgtatttatattgtacttaaataaattttacattaaaacaaacaaacaagataatatattgctgccacacttttcagatgctagagtgaaaagaggataaaggccaggcgtggtggctcacgcctgtaatcccagcactttgggaggccgaggcaggcggatcacaaggtcaggagatcgagaccatcctggctaacatggtgaaaccctgtttctactaaacatacaaaaaattagccgggtgtggtggcgggcgcctgcagtcccagctactcgggaggctgaggcaggagaatggcgtgaacccaggaggcagagcttgcagtgagcggagatcgcaccactgtactccagcctgggcgacagagcgagattccatctcaaaaaaaaaaaaaaaaaaaaaaaaaaaagaaaagaaagaaaaagaaacgtggataaaatataaagaatggttttataactaagataagtaaaattgcccaaaaaaaaaaaaatcctccacggtgattgtgaaatgtagttaaatgcacattgcaaagctggggaatggcaacaaatccttgctgtgatcaggttccaaatcactccaaagggacggactgtgtcaccctcaagagtcagagatgaccctcctgattcatgacgaatgtccaactgtgcagctgcagcaggtgggaaagagacagtgctcagtacatagcacttgcctacaagagttagaagggtgaaatctcccatgcctccccctggcccccagatcaaccctgttgatgaaccacactattccctcatttcaatcactttggtttgaaactttcaccattcaattcaggactattctgccatctgttaaaaaaaaaaagaataaaatcatccttaaaaagaatacagaataccaggcagttatttttaatcttggagagaaaaaaaaaggctactaggagtcctcaccaggactgtcacttcaagctctcagtccactaatttaaaactcttcaatcttgtacaaccccttcaacacacaagcaccaactccattacttatctgaggaaaagcagcttccccaaaatagaacattttccattaaagaaacacgtattccgttgacattaaaaaaaaaaaaaaggaagttagagaacggctatccagaccataaatagtcacgggaaattatagtcgtgtgtgctacagagaaggaaataaaggtcactcctgcagtttctgaaatggttttgaagtaggaaggaaacaagtttcagcaacatagttgtttaccatcgctgtttagagtatttttatgagtctgtttctttagatcccatttagaccaccttatttcctgttaagaatttctttagtgtagcattagaataaattacaatgtaagaaataaattttattgccctaaaatatcatggactagtgttggctgggaaactatataaaataatttcattaaaatagaattctcagctgggcgcagtggctcacacctgtaatcccagcactttgggtggctgaggcgggtggatcacctgaggtcaggagttcgagaccagcctggccaacatggtgaaacccccctcctctactaaaaatacaaatattagctgggtgtggtggcaggcacctgtaatcccagctactcgagagggtgaggcagcagaatcacttgaacccgggaggcagaggttgcaatgagccaagactgcaccattgtgctctaacctgggcaacaagagcgaaactccggctcaaaaaaaaaaaaagaaagaaagaaagaaagaaaaaagacaaaaatagaattctctaggaaatatgtagttatacacacacaaacacatgcgataaaacaaagtgaattcatgtttgcatattttttaggccagaaaaagagggaatgttttaaaaacagacaagtgaatgctcatctagaaagctgccaagcaacttaaaaaacccctcatggcatctgaataaagggaagaaagtgatttcctcaaagatttatcctctcatctttttgaaagttgtctgtaattaaggaactatataccttttatgcaaaattaagggggaaactgccagcatcatccacctccaagaaatgaaactagttagttgaaaccacatgaagtggttccaaaggacatcatctgaactgcataaagtctgacttaatcaccttgctggttaatagtcaaagagcaaacaattggactaaaaatattttttattatcatagtatcaggaaaattaaattcaatacccattcacttaagccattcttcctaaaacctcacaatgtttcagcaggagacaatttaaattggtttaatagtctacatttcatccttccaccagaacgaacaaatactttagttttgcaaagtttctccaggatggttaacaattttagtaaataaataggctccagaaccccactctctgctttcaaccttgcaaaaaagctgaattcttaaagggctgagtcaggtctcaactctgtatgatgtgataactatcctcaagcttcttccttacagaattttgtaataagtatactataaaaaagatggtttaatgtgccaacagctgtttcatgcttcatccatataacatttttcactatgcaatcctcttctaattagagaaaaagcagtaacatatgactgttttcttttcatttgtaaggtactttgtagattccacagacaccacagacctttcttccttcttcttttttattttcttttttgacagagtcttgctctgttgcccaggctggaatgcagtggcatttggctcacagcaacctccgcctcccaggttcaagcaattctcccaccttagcctcctgagtagctgggattacaggcatgcaccaccatgcccaggtaatttttgtatttttagcagagacagggtttcaccatgttggccaggctggtctcgaactcctgacttcaagtgacccacctgcctaggcctcccaaagtgctgggaytacaggtgtgagccactgcacctggccactattttctatctcatttgatttttccatcaccccagagatataacctctcatatttcacgaaagacaaaactcaaagctgagaaagtaacattatttggcaatggctcaatagtaactagtggcagagacagaaataaaactcggatttcatcagtctcaagtccacagttttctaccatgtgtctccaaaattcaaatgttgaaaaataattataaaaacctttttgtggggacattttcataggtcctttttttctaaaagagctggagggtcaagcagggcacctgcatgtaatgtgaagaccacgtgtgcacagcatttcaaactcaattcttaaaacaagttagtaaatagcacagtactcaagaacttctctcagcataragttcaaaagtctcagagaaaagacacacagatatggctcctgccctaaagtgtttggaaagtcacccgcaacaacagtgagacaaatccatttcctgcttcttgagcaattgctctgctctccttggcatattctgtccatttgactcatctatatattttttgttttgtttgctttttagtaatttccagcacaccyttaaattttacagccaaattctcttagaaacagggcacaggatttggtaccataacagatttatctatttgtagacataccaggtattgtaaaaatgatttttctggaaatctgtactgggacttatataccattaaaactctacatagtcacaactgtctaaccccagcaaaactcttacttttaggcaaccctctgatttctgtctccgaagcattccagaagtgtaaacattccaagtttcttattattgcttgtttttataacaaagtacttttgacagttccatctatcttcacaaggctgacacttcacgttgtatttcattatcagtcctcctttcttctccaatcagtcttattatcttagatgaccttgatgtttttgaagtgtactcgacaaacattctgtaaaatgtctctcaatttaggttttatgtttcatcatcattagagtaaggtcatgcgtttttggcaaaaatatcgcagaggttgtgcccttctcagggcatcacatcaggatatatgtgaggccaatgtcttattattggagatattaactttgattacttggttaaggtggtgtctgccaagcatctccactgcaaagtaataattttttcttttgtaattaaataacgtgtggagagatcatttgagactatgaaactcttctgtttctcatacttttgcccattaatttagcatttgtgcttgtaacaatcatttctgtgttgtttgccaagtgatttttctattttcatgattccctctacttacagtttgttaaatggaattatcctacaagagctctcccaatttatttacctaattacttgctttatttcagtatggtcatattgatgtttattttattctgctggatagaattyattactatcattgtgtactttttgctcacgttgtcccaaatgtggccactgggagctccttcaagttgactcacgcatcctttgacatgctcccgtcattttgtgagcatttctttacttttgggctcatcttgtattcagcctgctctagccctacactcaatcctgtttccaaggacacctgattccttttgttgaagaatgatacttaaaaagcaaagtctttttatttaattttatttttttgtgagatggagtcttgctctgttgcccaagctggagtgcaatggcttgatctcggctcactgcaacctccacctcctgggttcaagtgattctcctgtctcagcctcccaagtagctgagattacaggcatgcatcaccagcccggctaatttttgtatttttagtagagacggggttttgccacactggccaggctggtctcgaactcctgacctcaggtgatccgcccacctcggcctcccaaagtgctgggattacaggcaggagccatggcacccggccaaaaaccaaggtcttgatgttagatatacttcctggtactggcgtgtcactatttctaggccttcttctcagcagaaagaactaaaacatacatgtttagctgtctggtaaggtttgtctctcccttgtattaatagttttactttttcagtgttttcccggctattcttatatgattcttttaaccatatgaacagtagcatcaatttgtctaacttgatcataaaagcattttggtatttacatgatgattgtgttaaatttgcaaagtaatctacaaaaaactgatatcttaataatattaagtcgtcctatctaagaacaaggaatattgtttcatttgttcaaatttgcaaatttcagaagtgttttaacgttttattcatacagtttttgcacatttcttatttattcttaagtaacctcctttgatgctattttaaatgggattttcactaccaatataatatgtcttccaatggctatgtttgtgtatacaaaggcttttgatttctgcatattaactttatatccctgctactttgttgaaatactttgttgtctgaattcatttatcagtgattctctagggttttccaagtatactatcatgttaactgcaatagagatagtttctctcttctttacccaacgctcatgcctctaattgatcttttcttgtctaattacctggctaatatatctaatataatattgaataagagtgaaaataacgggctttcttgtcctgttactgatcttagtagaaataccaatggggtttccccattaagaaattggctttaggactaagtgtgtgtgtatataatgttaaagaagtatccctccatacctgaggtactattttycttatttttttattaacagctttattgagatataattcataattcacatatggctacaccttgtttatccacacatgagctgaggaacatttgggttgtttccattttgggggtaagttaagttcaagtacatgtatattttattttagattcagaaggtatatgtgcaggtttgttaaacgggtaaattgtgtaatgctggcatttaggcatcacccaaatatttgggtaccaccaaatagtacccaataggtagtttttcaaaccgtatatcccttatctctttcagagtcctcagtgtctcttgtttccggctttatggccatgtgtatacactgtttagcccccatgtattaagaaataatgtgcagtatttttctgtttctgtattaattcactgaggataacagtctccagctgcatccatgttgctgcaaaggacataattttgttcttttttatggctgtgtagtattccatggtatatatgtaccatattttctttatccaattcaccaccgacgggtacataggttgattccatgactttgctattgtgaatagtgttgcaataaacatatgagtgcagggaaggtgtctttttgataaatgatttcttttcctttgggtacatattcagtagtgtgattgctgggtggaatgatatttctatttttagctctttgagaaatcttcatactgttttccacaggggttgaactaattcacattcctaccaacaatgtatgttctcttttctccatatccttgacaacatgtgttatattttgacttaatagtcattctgactggtgttgagatggtatctcattatggctgtaacttgcatttctctgatgattgtgatgttgagcattttttcatgtttgctggcagcctgaattttttcttttgagaagtgtctattcatgtcctttgctcactttttaatggggttgtttctttcttatttaagtttcttatagatatttgtcctttgccagttgcatagtttgcaaatattttctaccattctgtagattgtctgttcattctgttgtttcttttgctgtgcagaagctctttagtttaattaagtcccatttgtcaatatttgtttttgttgcatttgccttcgaggtcttagtcataaattctttgcccaggccaatgtccagaagagtttttcttctatgatttgtatcctttgaggtattatatttaagtttttaatccatctttagtttttgtatatggtgggaggtaggggtccagtttcattcttctgcatatggctaaccagttttcccagcactatttactgaatagagtgtcctttcctcattgtttatttttgttgactttgtcaaaagatctgttggttgtaggtgtatggctttattcccaggtctctattttgttcctttgatctatgcatctgtttttgtaacagttcgatgctgttttcattacctacagtgtttgcagtatattaccttgaagtcaggtaatgtgatgcctaagactttgttctttttgcttaggattgttttggctatttggctcttttgtgtttccacatgaattttataatttttttctaatttcatgaaaaatgacattggtagtttgataggaattacattgaatctgtagactgtttgggcagtataaccatttaaatgatactgattcttccaatccacgagcatggaatgtttttccacttgtttgtgtcatctctgatttctttcatcagtgtcttatagttctccttctagagatctttcacctcctcggataaatgtattcctaggtattttatttcatttttttgctattgtaaatgggattgtattcttgatttggttctcagcttgaaagttactggtgtataggaatgctactgatttcgggtgctgattctgaatcctgaaactttactgaagttgtttatcaagtctgagagtcttttggaggaacttttagggttttctaggtatagaatcgtatcatcaacgaacggataatttgatttcctcttttcctatttggatgacctttattctttctcttgcctgactgctctggctaggacttttagtactatgttcaataggagtggtgagagtaggcatacttgtcttgttccagtgttagggggaacactttcaacttttgcccattcagtatgatgttggctgtgggtttgtcatagatggctcttattattttgaggtacattccgttgatgcctagtttgttgagagtttttatcatgttgggatactggattttaatcaaagacttttttcacatctattgagatgatacagattttgtttttaattctgtttatgtggtgaatcacatatattgatttgtgtttattgaaccatccttgcatcccaggaataaagctttcttgagcatgatgaattatctttttgatatgctgctgaattcagctggctacttatttgatgaagatttttgtgtctatgttcatcagagatattggcttgttattttccttttttgttgtatccttgtcagattttggtatcaggatgatactggtttcatagaatgagttagggaggaatcctgccccctcaactttttggaatagtttcaacaagattggtaccagcccttctttgtcatgtctggtagaattcggatrtgaattcacctgctccrgggctttcttttccattggtagatttttattattgactcaattttgtaactcattattggcctgttcaggattttgatttcttcctggttcaaccttgggaagctgtgtgtttccagggatttatccatttcctctagattttctactttgtgtgtgtagagatatttgcagtactctctgaggatcttttctgtttctgtgctatcagctgtaatctcatctctgtcattttcaatttgtgcttatttggatctttttttttttttttttttttctgtcgcccaggctggagtgcagtggcgccatctcggctcactgtaacctccgcctcccggattcaagcagttctcctgcctcagcctccctagtagctgggattatagacatgtgccaccatgcccagctaattgttttgtatttttagtagagatggggtttcaccatattggccaggctggtctcaaactcttgaccktatgatccacctgcctcagcctcccaaagtgctgggattacaggcatgagccaccgtgcccggccctttttttttttttgttaatctagcgagtagtctatcaatcttgtttatcctttcaaagaaccaactttttgtttcactgactcttttttttttttggtctcaatttcatttagttctcctctgattttagttatttcttctcttctgctagctctgggtttagtgtgttctgttttttctagttcctttaggtccaacaattagttgttaacttgagatttttctgttttcttgatgtaggcacttagtggtataaacattccctttgctgtatcccagaggctttggtatattgtgtctctattttcatttgttttaaagaattccctcaattttgtgtttattccaaagtcaatcagaggaccaaactgtttagtttccatgtattcattgttgttgttgttgttgttgtttttttttttagatggagtctctctctgtcacccaggctggagtgcagtggtgtgatcttggctcactgcaacctctgcctcccgggttcaagcaattctcctgcctcagcctcccaagtagctaggactacaggcacgtgccaccattcccggctaatttttttgtattttcttttttagtagagatgggactttcactgtgttagccaggatggtcttgatctcctgacctcgtgagcctcctgcctcggcctcccaaagtgctgtgattacaggcatgagccaccgcacccggccctatttgtgtggttttgagagtttctyttggtattaatttctagttttattccactgtggtctgagaagatgcttgacaggatttcaattttttgaatttgttgaggcttgctttatgactgagcaggtagtcaatctttgagaatgttctgtgcatagataagaagaatgtatattctgtggttgttggatagagtattctagacatctattaggtctatttggtcaaatgtcaaatttaagtccagaattagtattctgccttgatagtctgtttaatgagatactgaaatcccctacttttactgtatcgctatctcttttcttaggtctggtattcgttttataaatctggatgctctgatgttgggtgagtatgtacatagrataattaaatcttctggttgaatygaaccctttattatataatgcaattttttttttactgttgttggtttaaagtctgttttatctgatacaagaatagcaactcctactcttttgttttctatttgcatgatctctctccttccctttactttgagtctatagatgtcattacatgtgagatgggtctcttgaaggcaatagaaggttgggttcaagcacatgtactgatatatctgagtctcarctctgtcataattatttcatattcatatttgccatgtttccctctctataggatatatattatgccttctttaacacattaatttttctggtatttaaggaagttcgtgtttttgttctatggttatctttgtacttatgtcttattaaatgaccttatccccttggatttttatttaatcatttcttatctggcttgccagtttttgtcagcattctgtaagttacacctattgcctagatggcaatcgataagctccttctactttactttttcctttttctctcttcccatttctaagcgcattattttttattttgtttttagagacggtctgtcactcaggctagagtgcagtggtccaatcatagctcactgcaccctcaagttcctggactcaaggattcctgagaggctcctgcctcagcctctcaagcagctgtgactctaagtgtatgtaaccatgcctggctaattttaaaaattctttgtagagacagggtcttgctatgttgcccaggcttgtctcaaactcctaacctcaagctatcctcctgctttggcctcccaaagtgctaggacaacacgcatgagccaccactcccagtcaagctgcgttactaacagtttgtcaccactttttgtatattagtcttccaccctctttcccacctttcagtctcaaatctacatttatatataccaaaatgctcamtatcattccttttgctaaaatatactagttatttcttggtgggataagttcatcctctggtacatcacgcccaaacagctttctgtgtggacagaaatgttccatgtcttcactctccagcatggtacccactattacatgtggctactgagcacctaaaatgttgactaatacaatgaattaactcttacatatttataaattacaatttatttaaattactactaaaagccactggattatatactttcttaagaggatgaattttatggtgtgtgtatacctaaaaagctacatgtgactacaggctttgaatcagacttaacagctttagcagattcctggagaagggatcatgggtgcacagatctctaagtccttgaggtctttaaaaaaacagctttatagggacgtaattcacataatataaaatatacccttttaaattgtgtgacttagtgattttttagtttttttcacaaacttgtgcaaccatcaccaccatataattccacaacagtttcatcattccataaagaaaccctatacccatctgtagtcactcatcatttctcccttcctcacatcccctggatctactttctatctgtatggatttgccaaatccaaatatttcatataaaaagaatcatacagcatgtatccttttgtgtctggcttctttcacttagcatactgctttcagggtttatccatgttgctgcatatactagtaccttttactggtgaataatattccactatctattataacagtttgtttatccattaatcaagtggtagacatttgagttctactttccagttgttatgaataatgttgctatcaacattcatatacaagtttggtgtaaacatatatgctttcatttctcttgggtatatacctaagagtagaaytgctgggtaatattgtgtttaattatttgaggaactgacaatctgttttccaaagtacttgcatcactttacattcctgccagcagtgtacgaggtttcagtttctctccattttgtccaatatttgttactgtgtttttgattatagccaccctagtgggtataagtcatatctgattgtggtttttgtttacatttccccaatggctaatgatgttaagcatctttttatgtgtttcttggccatttgtatattttcttttgagacatgtctattcaaatcctgtgagcatatttttcattcagctatttgtcttctttattgtgaattgtaagagttctttcaagttccctatcagatatatttctgtgggttgcacgttcactttcttgatggtatcctttgaagcacacaagttttaaattttgatcaaatccaatttatctatttttttagttgttgcttatgtttttggtgcttacatgtttaacagttttctataacttagatcttaaaggagacttggcttgatataaaaaccytgagtcaatctttcattaagtttttaaaaaacattactccgttattaccttgcattgtataatgtttttgagaagtctaatgacaatctaaatatttgccttttaaaactattttatctttttactggtggtcataattatttatatcttcaaaatctaatagttttaatataataagttttaaaatggaacattctgggtttattccaggtatccaatcgatactctttttcacatgtactttaaggtattttgtttgttgttgaaaaaattccttgaatggtatttttaaataatagttctgtcaattttttttttgtytttgttcttcaaggacacatatacaaatgttatgccttttggatctgtcttccatttccactgttttatctctaactttttcaaataattctttatcttattttcatcctcttcattttcctttgtttctttaatgtcccttattaatttttcgggtgtattctcccttgggcaccctgtaattactcctcatttctcagataactgtcattttcttccattttctgagttcaatcacttctttccagcccttcctgtttgtccactttgttctcagttccttaatttctttgttttatatcataaaatgttcacttgactatatttaattttgctgggaatgttgtcttatagttttcttaggcttcacaatagattttttggggtacgaactattcgacagtggacatatgttgttttttgctttcttattttgggagccaataacccaatatggatctgttcatctttttcccagtcattttcagggtatcaggttgtttttacaagtttcttagttcgatgctatatcttctatcagcacagataagtgaagatacattaagggatctctttgtttggactgagtagggaagggctgtgtgtcctctgatgttctggttcacttgtcttgtagaacctttagttttccccatttgcttcgcttcctctttaccaatccaattgccaattttccttcaattactgtatttctggcttgctatcccttcaagttgcacttacttatacctaaacttaggtggtagtggtagacccacctaaagccccactaccagctttcctcttctctcttccccagtttttctgaatctgccgtcgcttgacacaaaaccttagggtatagcatggatacagtcaaagtgtaattgctgggaattgatgcttatttctctttttatttataaattatcctctcactgaattaagatgggggctatcacactttggagctgctaaaggaacaacatttctcacagaagaygctctagctcagtagggtgcaatctggctgcacttcctaattctctagggagctttccttagtgcagaattctcaacttcaactcgragatattcttgttaagtaggtcagggtagggcctcaaaatctatatagcagaattctgatggctggcagagttgagaatcatcgtggtgcaaaaacccctgtcctaatgcattttcatggtttctggggatacrcacacccctcactggcagggtggactcgcccatctcatccattttaggagcatcagagaaacaggggcaaagatgaccaaagcagtctctcagagtacaggcagaactcttctgataatctacgaagggcmtcttttcaatctcagagcaatgttcacagctgaacacaggaatacttggaagcttctggctaaacctttctggtttgttctggttaagaaaaatggagtttgccaccagaactccaaccttgctaagattacataatcggccactttccaatgcccccacycaactccgttctccaggactgaggtagatttttttgggagaaataggggagagaaaagaatgaaaattctcttccccttcatagtattctaaacatcattgactgattctctagttttgaaaaaattgtcagttgattttgatgtaataaccctggttaagaactataccttaaaatatttgaggaacacaacactttaaaaagcagagaggggatgtatatgttatctagaaatatctctagacacattcagtttttccattaaaatccttcttttataaaaatctatttgtttcagcagtagtacctgggtcaccttaagctttcagtgtgttcagcagaccatctgcactggagtcactgggggagccttgataaacatacagttcccagactatccctctaaaatcgaagggagaagacctgagataagagccaagaatctgcatgtttggtaagtactctaggaaattctgaaaacactttgagaaacactatcttagtccactgtgactctgaaaacatcagaacttcactctcaaaacatcagaacttcacgatacatcagaatgtcaaaagatagccctcgtcactgaaaaaaatagttgcctacaactcagatttttaaaatgccagaaatatctgtctttgccaaaaggcaccagttgtcatggtcaatcgatcatgctcttctaaattttctgttcccttttagtccctttgatatttacacatattctgagtcactgaaacttatggcctgtaatgtgactaatactctgggaatatttaataagcacacatgagcaattaccacaaagctcatttgaacatacacttccccaacttctgcccctgaaaataccttgtactagtccacccaggaataaaaacagacctggctgccctcccagagcagggacctataactcccctttaaagggtccattttcggctttgttaattaggctgactttaataggaaaagcggtctggccatcaaatgtgcatgcagatgctagatggacagggagtcagccaatgccaagatttcaggaagaaacagaaggatggcaatccctctggcaatgtctcatccactccggtgacccatggagaatgtctaccctccttgcacccatctgttgatgacaactaattatctgaaactcttttggggtttccatcaggaaaatcctcaactctaattaaaaagacaggtaaatgagaaatctaggcccatgatctagattagaatatcttcctcaagtatttagaggaagatgaagataactaaaagttgtctaatgtaacatagattcccctgtttgttatttggttaccaaatagcttcctgctaccaggtatagcagattaatatatactattctaaagttgtaatacctttttttcattttttgagacacggtcacactctgtaacccaggctggagtgtaggtggcgtgatcagagctcacggcagcctcgaactcctaggctcaagggatcctcccacctcagccttccaagtccagaggtgtgtgccaccacacctgactttttttttttttttttttttytcaatttgtagtgacagggtcttgccatgttgcccaggctggtctcaaactcctaggctcaagcaatcctcccgtgttggcctcccaaagttctgggattataggtgtcagccactgtgtctggccctgtaatacttaacagacagtatcacgtaattaaaactatgagactggctttagcaggcaaaattcagagcaaaggaaaactctcatgagtcaaaatatggtcttctgctctgtgtccaacaacacatgcttctctgatatttctcttgacacttggtagtgcaagttctacttcagaacacgaaccactgaaacatataaagccctttcctcagttatataacgaaacacagaactgtaaccataatttattatcacaaaaaaatataaaaaaggaatttccatatttttaagatttgtattaagtagcaaactgaatggaagggcaactgaagcaaagtctcaccaatgcctgcagctatttgccaaacacacagctttgtatcatccaacaacaaaatgttgctcattataccatgagcctaaattatactagaccaaccgtgtaattttccgtctattctaccttcttaaacctacctttcactatagtttattgtgcagttagtttaaactcttcattcgattgtaagcttcttgaggataattcctatgtttagtcatttctcaatgtcctatgcatccagcacagtgatttaaactcattgagatgtctgctacattgaaccatgtgaacaaaaacaaatcacaactgaaaccacctgcaagaagccagtcacaaagaatctttcctaaaaactgtctttaatattttaaatttcatgttttccgggttggcctacttcaacaactgtcagtactagtttattcatttccccctcaaactcatcaaaccaaatacacgatatttgtcaattttcctgagtttaaattatgcctcaataaaaaaaagtaataaaatttttaaaaataggtaggtaaaaatttccattattgaggttgtgcaaagaggctaagtattaacctttaaaggcaataatttggtggaaatcattagaaaatatgatttttcttatcttctaacaagtgaactaatacaaaaataggtttaaaaaaacagctaatcaaatttatcccacccccttcacataatcctgtctgcccaagataattaacaatcttaacttttctctctgattctactatatcagttgctatgctatgctggagatgtagcaattacagcttggaaaacaaaggtgcaggagtatgtcttcttgaaaaagtttcttatttctcccattttttggtcatttgttttactctcataaaataaaacaaagatatttgccccttctcattcccccaaccctttactccagaactctcctgtgccagaaatgcatttatccygccctgtcctcccctcgcagcctccaaaggctggcaaattgtcccccacggtccctgttttcaaaaatgcagctggctgtagacaggtcagtctatttgtatggggatttctgcctaaatgcctttagctaacactgctggcctagcttatgatagcagtgtccttccactggctcagttcacatctttgttcagttcacattcacgttccagttcacacaatccttccttttccaacatacaggtaccgtttgggaattgcacaaataagcaaaatgagaaaacccaggtttagaatgacctgcacagaattacaaagccaacaatgaaggcagtggttctcaatcctgggagtcaccacaatcccctaaaactacaactgttcttacttaaatccttgtccaaacacatctaaacatgaaaatacagtctccagagaatgaaatacagaaacgtccttgtaaaatcaaattctcaggaatgaataaagaatgattattatctattggaaattctagcactgataacctctaatagttgtgaacttaccagaattggccagattcagaaatggtttttatttcattcaggctcctaaaacctaaatccattcctttatttggttctacagattcagcgtagaactctaggggaacaagtggattctcattatgatataacttataattctccataggagaagaaatcaaattttatagtattcacaaccaaaaagcatatgtctaaagtgatctgtctctgcacactgtgctttgatattaasgtaaaaacaagaattctagcctggtgcggtggctcatgcctgtaaccccagcactttgggaggccaaggcgggtrgatcacttgagatcagaagtttaagaccagcctggtcaacatggggaaaccccatctctactaaaattacaaaaattagctggaagtggtggcatgcgcctgtaatcccggctatttgggaggctgagggaagagaatcacttgaacccaggaggtggaggttgcaatgagctgagatcacaccactgcactccaagcctgggccacaaagctagactccgtctccaaaacaaacaaacaaacaaacaaacaaacaaacaaaaaacccaaaaccaaaaaacaagaattctttcaatgatcttgaaacatttcactttttaccaggaggatgacacagtactggccaattacaatatgacaatcccattttctcatagttctattgtttctttataattattccagttggaattcrttataacttacatgagtacactgaaaataattttctttttaagtgaggaaaacagaacgaaaggaaaaagaagagtgctagaaatgttctatatcttgttctgggtaaggtggtccttgcaaccatttcyataaatatgtaaaaattcattgagcagtaggcttaaaagttggacactttactgaatgtaagtcatatttttgtagtaagatttttttactcttattaaagatttatggaaaagatgaggaagaaaaaaatataaagccaggaatgaaggtagtatttgaaattccttaaattctctatcatttattacacaaatattttttgagcactttcctttattccagacacagtgtaagatgttgatgataaaactataattaagacacagtcactggccacatggtgttagtaatctaataatggagagagacaagtgaacaagaaattacaatacagtgtgtgatgagtattacagcaggagtaagctcagggagttaggaacatgcagtgggaaatctaattcggcttaggagagacagagatcgcagacggccatttcacccacataatatgacacatgctgaaacatagctaacatttattttgtaaggtaaaaagatctgtcatcatttccttctcttctctgcacttctagaagcaaaattaaatttaacgtttttgtcttcattatgagatacactaaaagttagatccttcatattgtctctaaagtaatggtcactccctaaaaataaacatgggagcagaagtcaaaataactcaggttatgaaacacttgagaatgatgcacatgggttctgaagcaaacaagatgctccaaagtaagttaacagccactgttacttaaagctttctttaaagaaaattctgtatgtggcaacttatcacaacaaaataacagagcttcatttaatgttgaaattaacctctccctcccattcaaaacaacttcaaatgcttagtgtatgatacaagtaatttaggaaaattttgtttgttcaaaacaaaataattgaattgaatrtggaattaattatgataaagataagaaggactgtttaaaaaacaataagtcctaggcgtggtggctcatacctataatcccagtattttgggaggccaaggtgggtggatcacttgagcccaggagttcgaaaccagcctggccaacatggcaaaaccccacctctactaaaaatacaaaaaattagctgggcgtggtggcacatgcctgtagttccagctacttgggaggctgaggcaggagaatcgcttgaacctgggaggcagaggttccagtgagccgagatcacaccactgcactccagcgtaggcgacagagtgcgactctgtctcaaaagatcaaaaaacaaaaaacaccaccaacaacaaaaaacaataacaactaagctaactctgggacaattcatctccatctcccaaagtcccaaacatgtgaaagcgggaacagagaatcataagataattaagctaagcctggcatgggatgtgaccaggtagtaacagagcagcacacttctcatccttgttttacacctacatccccatgacacatgtttatggacaatgtaacctactttgctccagagagcagcaaagttaataaagaatctataggttgctcctgactccatcgcctacaaaatggtcagtaaagtggctggcaaaactatttccttcacaaatctgggacagatacatactcagaaagtttatacagtctcaggtcacgaaagacaaagatacaaatgagggaatatttatagactcagatgataaacaagacaaatggctttacctgtcagccttcatcagaaggttaggtgggagctcaaggagctggttgtgttgcacatccaagacctccaccgaggttctttctagcctttcaggcagccttgccaactggttgtgtcctgccagtagtttccggagactgctattacaaaataagctgtataaaaagggacaaaagaccaaaaaatgaaaaagagtaaagaatacttaaaattacctctccaaaaatcacaaattcacttggagcaactacaaattcattttaatataaattcaaacttgaaactatttgtttcaatactttctatatactcaaaaaaaggaggaaggaaaaaactatgtaaacaaatattgagcaaagaagctctacatagcaaaaaacaagttctatagatgtacrcactgaagagatcagtctaatcttgttagggtcacaaggcaagctttcaaaggctgcatgcttctccagagtagggcttgtatcttgtattgtcccagaatgctgggtgctttacccataagagattctgagtaaacacaactgagcagtctttacctacaggatctgcattaaataaagggttcttcaatcaaacttttacaaatgtccactgagaaaatgttatgtttttcctcagttgcatttatttcacaatcctaattatttcttctttgcctcacttccctggctgtatgtctgttttttctagcttaatcctagaccaaggtagagactgtctcccgaaagagcagcatgtacttaatccactgttttcttgagagacttaaagagctgtttggaagcttggctgtgtttcttgtaaaggtcaccagaactgtcagagatgatgaatacttgttaatctaatgtaaatctacattatgaccacttcagacttctccaacattacagagaaaacaggccctgggtttaaacagacatctggggggtggggaaaagtgaggttacaatttgcatcctgatcactttagatcaagaattaatttatcaatctgcctaattaataaattaatttattaatctgctgtcaaagaatgaggcttcctcatccacctcctgttttccaccattctgatctcactcacaaatgcccacaattttttaaagttaatttttaattaacacaaattagcatatatttatggtgtaaaacatgttttaatatacgtatacattgtgggatggctaaatcaagctaattatcatatgcattacctcacatatttatctttttttttttgtgatgagaacatttatatctactcccttagctattttcaagaatacaagacattgttattaactgtagttacaatgctgcgcaataggtctcttgaacttactcttcctgtctaatccaaattttgtatccttcaatccacaagagttaaaaatctccataacattagggaataactttattcactttaaatagcaaatggagtttctttgctcacaaagatgctagcaacctgtctcaaccctgtgacaccacaggccccaattaaagatccctgagttggcaggtttagctatcagtgtgacaagacagattatccaggccagattatctatgcagttaccattaccacagggcagtctctgtaatggtcactccagcctattagctcagcatgtggttcatcatatatatatatatatatatatatatatatttatcctttaccacataaataactaaaaggtgataaaatcttttatctttatttttccaaataaaaaagatcaactataggacgaatactgaatgctaattattgggtttagttcaattcttttgggtactgtctaaacattaaaatactttctttccttttcaatacatttccgcctctaataatttctcttttgtcaaactcttttttttttttttttttttgagacagagtctcactctgtcgcccaggctggagtgcaatggcgcaatcttggctcactgcaacctccgcctcctgggttcaagtgattctcctgcctcagcctccagagtagctgggactacaggcgtgcaccaccaygcctagctaattttcatattttttagtagagacggggtttcaccatgttggtcaggctggtcttgaactcctgacctcagttgatccgcctgcctcggcctccccatgtgctgggattacaggcatgagccactgtgcctggccctgtcaaactctttatataccttacttggatagacaaagtatgagtattaaatcaattttaatgaatcattgccttgcctgaatttttttttttctttttctttttaagaggcagggtctcagctccgttgcccaggctggagtgcagtgatgcaatcataggtcactgtaacctcaacctcctaggctcaagcaatcctcctgcctcaagccttccaagtagctgggactacaggcacacgccaccatatctagctaattttattttttgcagagataggttcttgcagtgttgcccaggctggtcttgaactcctgggctcaagcaatcttcctgccttggcctcccagcgtgctgagactacaggcaagagccacggtgcccagccttgcctattacatcaacaacagggctcacacagagtttgcaattgaacaacactataaacagaaaaacaatgcatactctttttgtcccacatgttaaacacacacacacacacacacacacacacacacacacacacacacacacaaagaatactgtttaaattctttaacaatagagcatttgggatttgcattgaataagcatttgtttagattctcaaaaagcctgttctgatacagaacaaattaaagatcaacaaatttgggaggaaaattggataaaatgtcagttatcttgaatttgtttgtttatatatataaatatataatatataaatatataatatgttaatgtataatatatacaaatataaaaaatatataaaatatatctttgtagccttcagcaaaacagagaacttggatgccaatgtgctatctgtgggattgaggggtggaggtgggaaagagaacagagaaaatagaaaaggctaggtgtggtggctcatggctataatcccagcactttgggaggctgaggcaggcggatcacctgaggtcaggagttcaagaacagcctggtcaacatagtgaaaccccgtctctactaaaaatacaaaaattagctgggcatggtggtgcgtacctgtagtcccagctactcgggaggctgaggcacgagaattgctggaacccgggaggcagaggttgcagtgagccaagatcgcaccactgcattgcagcctgggcaacagactgagactctgtctcaaaaaaaaaaaaaaaaaaaaaaaagaatagaaggaaagaaaatagaagaaaagataaggtaaaaaatttttttcaacgaattatttttttccctactgttttcatttttcctgttcctctactaaaagggtcatgcatggacacacacacacacacacacacacacccaccctcttgttaatggtgatggctgcaatgggtcacttgaatgctcagtcaacataatattctagggcagaaagcactttcaaatggatcgtatttacaggtaaaatgtattgctgcagaacataatgaaattaacagagcttttcagggatgaaaatataactcagatttctttaataagagctacattctaacacagtgttatcaaatataagccacatgtaattttaaattatctagtagccayattaaaagaaagaataaaagaacaagtaaatgaattctcagagtattatttcatttaacccagaatataccmcaaatattaacatgtaattaatgtacactattattaatattttatattccatgtacattttacacttatagcacttctcaattaggactagtcacatttcaggtgctcaacagtcacttggctaatggctggctgggggctaccatactggacagctcaactctaacatgtttactaggcttaccaagcaagtatatcttctgggtaaggaaacaggaatggtgatcacatacctttaaagattgtgcactaaagtaaaagtttactccaaaatggtgacatacttctataatattttcactgatgtttctgactacacatagctaaaaataactgacttcctctgttcagtgactggctgagaatggtggaaataataagacctgggttgaggcagccacaagtaactatatgaatttgttaattggaattaatggatacacaaaattcagttcctcagtcacattagccacattgcaagtgctcaatagccacagacggccagtggataccatactggccagcacagatgcagagcacttcaatcatcacagaaagttctacaggacagcactggatagactcttggttactaactgcatggctagtcactaawagtccactaatattttggaccatgattagtcaacttgaaaatatctgtctgtatttacagacaatagaagtcatcgcgtggctgttttgcaaatcctgccattgaagtgaaaattataaaataaaaataagaacatatttaagagagagaaggaaagagaagttcttgaaccttctactcccaaatttcacaacaagaaaaagagaatctagtttgctctttctaggtttcatgacctaaccatctttttcccccgtcaaagttaaagtctagggagaacaaaaggtatttatggttaaagtagacatgttaagtcaatgaacagaggtggaagattctgaaagacttaagattccagaagtgrgccaatcatattgtttgcttcaaagattgtttttggcttacttaaaaatttccaccaagcaccactgcctgcatggttttgaaaagtctggctgacagtcaaagcctcactctactcctcactgcactgcatgaagcaagtgtgtaacttgaagacaccacatggggtaaaagacaccatattagtttttaaagcaaactcttttaggcttatgataccaagttaaacactgaatcagcaatttttaaaattgctcatttattgtgagatcctctcatttgatctgtaatactcaccgggcaggaagttcacatatttgattatggccaatatccaaaacttctagctttcggctttcacatacccactcaggcacattttctaagcggttcctaaatgcaagaacataaaagtaattggttgaatttgtcctcaaatgtggttctaaactcaaattgattacaaagaataaataaaacctcaaataaaataccaaagtaccaagggcataaatcgaaagaatgtgtggattcgcttttctctagaagcaagatgaattgtgatagggagaagaaataaagaaaaagtaaggaagaggcagagcacagtggctcacgcctatgggaggatcacttgtgcccaagagttcgagatcagcctgggcaacaaagcgagactccatttctacaaaacataaaaaattagttgctcatggtggcatgcacctatagtcccagctactcaaaagggtacagtgggaggactgctggagtagaggagttcgaggtttacaagtgagctatgatctcatcactgcactccaacctgggtgacagcatgagaccctatctttaggttaaattaaacttttaaaaagaaggaaggacatagttacatagtctgtatcatctctaaagtctaaaaaaacagtctagctccaaatttactttcctaaagggtctatagacctatgccaagttcagggagaatatgtgttatattgaacataaaaacacacgaagtcaatggcatatcatagttttattttcaaatttgtatttttacacttaatattaaaatatttcccaactccagctgtcatcatgaaaacacagccatggacaaatgggaagggagagaaacagttttaaaatggtggcagtgaaaagttcactgacagttaagactcagaattaattatttaaaaacatttacttgggcactagatggtaattacagttactataaaaaagagaactaggccaggcatggtagctcatgcttgtaatcccggcactttgggaggcccaggctgcagatcaccggaggtcaggagtttgacacaagcctgactaacatggtgaaaccctgtctctactaaaaaaatacaaaaattagccgggtgtggtggcacatggctataatcccagctactcaggaggctgaggcacgagaatcgtttgaacccgggaggcggaggttgccgtgagccaagatcacaccattgcactccagactgggcaacaagagcgaaactctgtctcaaaaaaaaaaaaaaaaaaaaaagagagagagagaactaaactaatggtgtctttaactattaaatgaattgatcattacttagataaactactctatttgaatgtgtccctagtcacactggttagctttttactttctttttaaaatacataaaatgatcaggcrcaaagaatttcaaacagtacgtacattatgacaattctttatacacagatgagtaattctgtgaaaacatgatgcttgggataagaattataagatattacagcaaaaggaaaaataattttgatgttagggtggtggaattatgcactatttatgttctttaattttgcaattatatctactcctcaattaaaatacagaaatagaaggaattattttctgcttagtgtctgtataagcacatacagttctggatttgaagccctaaacattgacatgctcatttttttttttaattgttaatatctaaaacatctcaacaggataggggattgaaagtattctttagtaaaaacaaccccaacatacaaaaattaaaacttctgtaagtgataaaataacttagaactttgcatggaggaacctgacctagtaaacactgtgataggtgacagcaygggaggtggatgaggtagtgtgttatagtgaagattctgggcatgagagtggccacaggaagatgaattatcatttaagaggcagaattcagagacaagcatgacacaagagtttccaattcagtctcacttaggggtttcaatggctaccatttgctgattacactgtttttaaaaagtagtttaactctatgactaattcttgaaaatacatctgggccgggcatggtggttcatgcctataatcccagccctttgggaggccaaggcgggtggatcacttgaggtcaggagttccagaccagcctggccaacacggtgaaaccccatctctacagaaatacaagaaaattagccaggcatggtggtgtgtgcctgtaatcccagctgctcaggaggctggagcaggagaatcatttgaacccaggaagtagaggttgcagtgagccaagattgcgccactgcactccagcctaggcaacagagcgagactccatctcaaaaaaacaaaaaaagaaaagaactgttcaagatatttatatgcatccatgtacgcaaatcccattcctatactcttcctatactgctcttattcaaaatgtgaaaataacatttggggttgctggggggtgggaggagtgggtggggaaagaaaactaattaggtaatgtctgatttaagttaattaaataaaattatctgataggtagtaggaaatgcatgaagcactactcaaagagttttatgattttataattatatatttataataaaaaaaaattttttttttgatggatcaggttttttattattttttttttaattttttttttttattatactctaagttttagggtacatgtgcacattgtgcaggttagttacatatgtatacatgtcccatgctagtgcgctgcacccactaacgtgtcatctagcattaggtatatctcccaatgctatccctcccccctcccccgaccccaccacagtccccagagtgtgatattccccttcctgtgtccaagtgatctcattgttcaattcccacctatgagtgagaatatgcggtgtttggttttttgttcttgcgatagtttactgagaatgatggtttccaatttcatccatgtccctacaaaggacatgaactcatcattttttatggctgcatagtattccatggtgtatatgtgccacattttcttaatccagtctatcattgttggacatttgggttggttccaagtctttgctattgtgaatagtgccgcaataaacatacgtgtgcatgtgtctttatagcagcatgatttatagtcctttgggtatatacccagtaatgggatggctgggtcaaatggtatttctagttctagatccctgaggaatcaccacactgacttccacaatggttgaactagtttacagtcccaccaacagtgtaaaagtgttcctatttctccacatcctctccagcacctgttgtttcctgactttttaatgattgccattctaactggtgtgagatgatatctcatagtggttttgatttgcatttctctgatggccagtgatgatgagcatttcttcatgtgttttttggctgcataaatgtcttcttttgagaagtgtctgttcatgtccttcgcccactttttgatggggttgtttgtttttttcttgtaaatttgtttgagttcattgtagattctggatattagccctttgtcagatgagtaggttgcgaaaattttctcccatgttgtaggttgcctgttcactctgatggtagtttcttttgctgtgcagaagctctttagtttmrttagatcccatttgtcaattttggcttttgttgccattgcttttggtgttttggacatgaagtccttgcccacgcctatgtcctgaatggtaatgcctaggttttcttctagggtttttatggttttaggtctaacgtttaaatctttaatccatcttgaattgatttttgtawaaggtgtaaggaagggatccagtttcagctttctacatatggctagccagttttcccagcaccatttattaaatagggaatcctttccccattgcttgtttttctcaggtttgtcaaagatcagatagttgtagatatgtggcattatttctgagggctctgttctgttccattgatctatatctctgttttggtaccagtaccatgctgttttggttactgtagccttgtagtatagtttgaagtcaggtagtgtgatgcctccagctttgttcttttggcttaggattgacttggcgatgygggctcttttttggttccatatgaactttaaagtagttttttccaattctgtgaagaaagtcattggtagcttgatggggatggcattgaatctgtaaattaccttgggcagtatggccattttcayrmtattgattcttcctacccatgagcatggaatgttcttccatttgtttgtgtcctcttttatttccttgagcagtggtttgtagttctccttgaagaggtccttcacatcccttgtaagttggattcctasgtattttattctctttgaagcaattgtgaatgggagttcactcatgatttggctctctgtttgtctgttgttggtgtataagaatgcttgtgatttttgtacattgattttgtatcctgagactttgctgaagttgcttatcagcttaaggagattttgggctgagacgatggggttttctagataaacaatcatgtcgtctgcaaacagggacaatttgacttcctcttttcctaattgaataccctttatttccttctcctgcctgattgccctggccagaacttccaacactatgttgaataggagcggtgagagagggcatccctgtcttgtgccagttttcaaagggaatgtttccagtttttgcccattcagaatgatattggctgtgggtttgtcatagatagctcttattattttgaaatacgtcccatcaatacctaatttattgagagtttttagcatgaagkgttgttgaattttgtcaaaggcwttttctgcatctattgagataatcatgtggtttttgtctttggctctgtttatatgctggattacatttattgatttgcatatattgaaccagccttgcatcccagggatgaagcccacttgatcatggtggataagctttttgatgtgctgctggattcggtttgccagtattttattgaggatttttgcrtcaatgttcatcaaggatattggtctaaaattctcttttttggttgtgtctctgcccggctttggtatcagaatgatgctggcctcataaaatgagttagggaggattccctctttttctattgattggaatagtttcagaaggaatggtaccagttcctccttgtacctctggtagaattcggctgtgaatccatctggtcctggactctttttggttggtaaactattgattattgccacaatttcagagcctgttattggtctattcagagattcaacttcttcctggtttagtcttgggagagtgtatgtgtcgaggaatgtatccatttcttcyagcttttctagtttatttgcgtagaggtgtttgtagtattctctgatggtagtttgtatttctgtgggatcggtggtgatatcccctttatcattttttattgtgtctatttgattcttctctctttttttctttattagtcttgctagcggtctatcaattttgttgatcctttcaaaaaaccagctcctggattcattgattttttgaagggttttttgtgtctctatttccttcagttctgctctgattttagttatttcttgccttctgctagcttttgaatgtgtttgctcttgcttttctagttcttttaattgtgatgttagggtgtcaattttggatctttcctgctttctcttgtaggcatttagtgctataaatttccctctacacactgctttgaatgcgtcccagagattctggtatgtggtgtctttgttctcgttggtttcaaagaacatctttatttctgccttcatttcgttacgtacccagtagtcattcaggagcaggttgttcagtttccatgtagttgagcggctttgagtgagattcttaatcctgagttctagtttgattgcactgtggtctgagagatagtttgttataatttctgttcttttacatttgctgaggagagctttacttccaactatgtggtcaattttggaataggtgtggtgtggtgctgaaaaaaatgtatattctgttgatttggggtggagagttctgtagatgtctattaggtctgcttggtgcagagctgagttcaattcctgggtatccttgttgactttctgtctcattgatctgtctaatgttgacagtggggtgttaaagtctcccattattaatgtgtgggagtctaagtctctttgtaggtcactcaggacttgctttatgaatctgggtgctcctgtattgggtgcataaatatttaggatagttagctcctcttgttgrattgatccctttaccattatgtaatggccttctttgtctcttttgatctttgttggtttaaagtctgttttatcagagactaggattgcaacccctgcctttttttgttttccattggcttggtagatcttcctccatccttttattttgagcctatgtgtgtctctgcacgtgagatgggtttcctgaatacagcacactgatgggtcttgactctttatccaacttgccagtctgtgtcttttaattgcagaatttagtccatttacatttaaagtkaatattgttatgtgtgaatttgatcctgtcattatgatgttagctggtgattttgctcattagttgatgcagtttcttcctagtctcgatggtctttacattttggcatgattttgcagcggctggtaccggttgttcctttccatgtttagcgcttccttcaggagctcttttagggcaggcctggtggtgacaaaatctctcagcatttgcttgtctataaagtattttatttctccttcacttatgaagcttagtttggctggatatgaaattctggtttgaaaattcttttctttaagaatgttgaatattggcccccactctcttctggcttgtagggtttctgccgagagatmcgctgttagtctgatgggctttcctttgagggtaacccgacctttctctctggctgcccttaacattttttccttcatttcaactttggtgaatctgacaattatgtgtcttggagttgctcttctcgaggagtatctttgtggcgttctctgtatttcctgaatctgaacgttggcctgccttgctagattggggaagttctcctggataatatcctgcagagtgttttccaacttggttccattctccacatcactttcaggtacaccaatcagacgtagatttggtcttttcacatagtcccatatttcttggaggctttgctcatttctttttattcttttttctctaaacttcccttctcgcttcatttcatcttccattgctgataccctttcttccagttgatcgcatcggctcctgaggcttctgcattcttcacgtagttctcgagccttggttttcagctccatcagctcctttaagcacttctctgtattggttattctagttatacattcttctaaatttttttcaaagttttcaacttctttgcctttggtttgaatgtcctcccgtagctcagagtaatttgatcgtctgaagccttcttctctcagctcgtcaaaatcattctccatccagctttgttctgttgctggtgaggaactgcgttcctttggaggaggagaggcgctctgcgttttagagtttccagtttttctgttctgttttttccccatctttgtggttttatctacttttggtctttgatgatggtgatgtacagatgggttttcggtgtagatgtcctttctggttgttagttttccttctaacagacaggaccctcagctgcaggtctgttggaataccctgccgtgtgaggtgtcagtgtgcccctgctggggggtgcctcccagttaggctgctcgggggtcaggtgtcagggacccacttgaggaggcagtctgcccgttctcagatctccagctgcgtgctgggagaaccactgctctcttcaaagctgtcagacagggacacttaagtctgcagaggttactgctgtctttttgtttgtctgtgccctgcccccagaggtggagcctacagaggcaggcaggcctccttgagctgtggtgggctccacccagttcgagcttcccggctgctttgtttacctaagcaagcctgggcaatggcgggcgcccctcccccagcctcgttgccgccttgcagtttgatctcagactgctgtgctagcaatcagcgagattccgtgggcgtaggaccctctgagccaggtgtgggatatagtctcgtggtgcgccgtttcttaagccggtctgaaaagcgcaatattcgggtgggagtgacccgattttccaggtgcgtccgtcacccctttctttgactcggaaagggaactccctgaccccttgcgcttcccaggtgaggcaatgcctcgcmctgcttcggctcgcgcatggtgcacacacacactggcctgcgcccactgtctggcactccctagtgagatgaacccggtacctcagatggaaatgcagaaatcacccgtcttctgcgtcgctcacgctgggagctgtagaccggagctgttcctattcggccatcttggctcctcccccaataaaaatttaactgtaatattttcccaatagctaartactgacacatcttgcataattatgattgaatagattattaaaatagctaagcctgtgtaatctcaagataaaaggcaaaattctgtagaagacaaatcatacaatagttgtgattaaaaagcatggtgactgttaataaacacaccagaatttaagccctgaaatgagttaacagttgtcaccttgagtgggccacaaactccctatgtttagaacatttttgtgtatctcctttggagttaccttccaaatgagttgcaattttaaaattcattgttaaaaatttttaagtttacgtggtataaatacatactgtagacactgtcaagcctttgtgccttcaagaaaaagtctactataatatttgtgggaaccgcaataaatataatacactgcagaagcaaattaccataaaaggtaaaatagttagcatattcaaaaaggagctaagaaaaccaagcaggttgtagagaatttctattttgataggctttgtcattatttcctaagaatttttagcgaagagatatatgtctaaacaaggggkgtaagaaatccaaagaaataaagcacttaaaaaattaaatcatcctaagacttggcagagtttgaaaaaaaattttgaaaataaaaaataaaattaacattacttcagggaaagacaaaaaaatatgattcatataatgaaaagagttattagagctttaagccatayggccctcaacttactcacctttcaagtccaaatgtgtgttcaaattggtgtgcacaggcactttgatgctctggtttgaactacaaatgtattttaatcaatagatatatataattttagagaataaagtaaaaatcattaattttttagcatttaccttcaaaatattaaaaagtacttgtgcataagctcagacagaattactaaataattttctagtagactctagagggctctaagacttgacttcttaccttgaaacatccatgtaggacagataatttggaactgggtaaacatcaagttgaacaagttctaggaagaaaaaaaaaaaccccacaaagacattactatacaaatgacatagagactctttttgtatgtggaacgtcattactgtgctttattctctattgtttgtttagtttaggaagtacaatacatcatttgtttaactttgaaagtgcaggaaaagtaaaaaagaacttttaatcacaagatcttcttcagagattgaaatacatcatgcattctaatttcctacctctttgctatccatttactgttgctcttattgttatgcaggctgtatcacatctgaaagattaaccacgagtaccatccttttaaaacccaagggtccttccataaaaccaagtaatgcttcttgtcttttgccctcatcaccttactgaaacagcactccagtgggtcacaaatgacttattttacttaaatctgaaacacttcctgaacactttatgaaatatgacaccactgtcccctgtcactgtgtttcttggacaagagtagtttgtaaatgtccttctgcttctctaaacaattaccaagtaattcacaggtgcagctcctatctggttgcccagtctggctgcagctaagtgtgaggggcttgtaagttgacctttggtactagcactctcctctcttccagttaccttacttccctggtttcaggtatcacctctgagcaggtaagtctcaaatcaacatatgtaatcttgactacaagttcccattaacccacatgaagcccatcacaataacttggattagtggagtagtggattaccctcaaccttcttctataaatgcattctgtacacactattttcacattaactgccttaaagcatcacttccatcaagtctcctccactttagagtctctactggttctctatcgcttactaagctaagggcaatgcttgaccatctgacaaaagcatgcatcccctaattacttctatgggttcagaattccctgttttctcccaactgccgaacaagccacattcagattctttcttcctacttcattcccactggttatctaaatcctataacccttcagtgctcagccaaactgattacactagaaaatatacctatttgaggcttggcttgtttttctgagataacagtaatcacatttgaaaaatccttcatctttcagagctcatgagctgcactatgcataaaacaagtgcgtgataaacatatgttcaacttgcagtagtgaacacttgttttcattcagtttactgactgtagggaatggaaaccttcatcttagcaaacatatgcccatactaccttttcttttttggaactgccctgattttcagattcttaggaagaaatattattaaatgattaagactctagcttyatggtgtccttcttgtgcatrtatcattctagtttatcttttttaaattatcttttcttgtcttttttttttttttgagacagggtctcgctctgtcaaccaggctggagtgcagtagtgtgatctcagacgaccgcagcctccacctcctgggctccagcaatcctcctgcctcagcttcccattcccaagtagctgggactacaggcatacaccaccacgcccagctaacattctggtttatattaaggtgagttctttgttagtcaaacatgaaactggagatcccgaatggagtcaaaataaaacttcctttcattctccagtattaaataaaggttccagatttagtaataaggtagtaaagatctctagatcttggtaatgtagcccaagaaatagttcacttttctctcttcctttaagcagaaaaatcaaatcaaaagtgggagtaacttatccaaatcacaatacgagaaaaaaattagggacaataaaattttcctttttgagtcctttaaacaataagtcagcatttttcttttgtgacttttattttagcaaaatttgagctattttactaactacttgagcaaagaataatcagaagcagaaataatgatgctgggtaaattcctggaaccaaaagagcaactttgatgtagcctatgatacataccattagaagaggcatagagcgcttttaggaaatagccacagatgtctaatgtgaccagttgattcctttcacagtgtaaaacttcaatgttgttgaaaatcatagcatctagatcaccaagcttattgtctcgtaggtcaagctgagtaacatgctgtagaaagtccacttcatctgctatcagcttcctaattacgttcaaccttgagggcaaaggacatagagactataattaactgcaatgctataagtaaatgggcacaccctaatatgagaaatagcgagaaagaactcagttctctctgtattatagttctccatgatttttggaatctcagcatccggcctttcttaactagccagagtatctatttttagctataattccaggaggttttaaccttcacaatatattctgaaacacaagtgacaccactacagctgggagaggaataagcacattgactttaccttaattcacttcaagagggaaaaaaattccacttaagcactgacttccaaagaactaggaactgacatccaaggaactgtgaaactatctacaccataccgaaaagaacataagaaacaaaactcagaacaactgttaggcacatcacaactacaacgaatatttaatgaaggagagaggatgcatgaacaggcggatgagtagcatggaattaaaggttgaggtggaaaaacagtaatggacgggagtcacacaacgaataagagttgcacactgaatgggagcaccagagatgggaatgcaagtacatgactcccaactgctcaggaccaggatgaaccaccaaaactatctctgtctataaaatactgcttgatagagtgaagtgcagaaaatactgaaatccggcatctagaatccattgagaaatcttagaatgccggacaaaaatgggaaccaacacctctgtgatgaagcaaggcacaggggaaaactggcggaatctctagccataagaactagtgagctaactgactgaagttgctgtggatgaactatcagaaaataagtagtaatggggactaggaaccaaaataacaaagacatatttagcttcaaaagggagaaaaatagatggaaatgtcaatttccagtttgttaggctatgtctaactcctttaaaaacaaacaacaaaaaccatctaytttccattacaaagccagcaaagtgctgagatgatgcacttgtttagaaaagtattaatataggatgggtgcgatggctcacacctgtaatcccagcactttgggaggctgaggtgggtgkttcaygaggtcaggagttcgagaccagcctggccagcatggtgaaaccccatctctactaaaaaaaaaatacaaaaaattagctgggcatggtggcacacgcctgtaatcccagctactcgggaagctgaggcaggagaactgcttaaacccaggaggtggaggttgtggtgagccaagatcacgccattgcactctagcctgggcgacagagcgagactccatctcaaaaaaaaaaaaaagaaaaaaggagtattaatataagtctagagtacaggaaaaagctagagtttctctatagtgaatttctgtcctttaaaaaaataaaataaacctatggaaaatgaattaagaataatatcctaaagccactgaaacacaaggatgagttccagcaaagagctgggatttgtcaacacgcaagcacagcatatggccttttccaatggccctaagaggatgtttttttggctctttctctttttttattccaggttgtaagatttaaaaactggccttgacccagcaatctgcttatttccaaatgctcactagattactagaatgtgtaaacagaataaaaaagaaaaaacacatctcatcttgggtacaacagactgcaggaatggaacaaatgtcccatcttcttcccaatctacacttcaaataaccttcmtaatggctttatcatcttcacttgaaagagccacacacaatttcattcaatacaatgaaattgtattagtactaaaataataagcattgaattaataaggagacaaaaaaatctataacaaaagcaaagttaatgtaacaaaaaagaaagctaacatttggcttaagttgttaactctcaccatgactgaaataccaagttttcaggttcacacagtaattcagctacttaggatgaaccgttttattatttgtttaattgacagataaaactgtacatatttattgtgtacagcatgacttttgaaatatacgtaaactgtgaagtgactaattctagctagttcacatgcactatctcacatagttatttgtgagatatttcacttttgtggtgaaaatacatccactctcttagcattgttcaagaatacaatatattatggcagggtgtggtagctcaaactctgtaatcctaccactttgggaggctgaagtagaaggttcgtttgagaccagactgggcaacagagcaagaccccatctctacaaaaaataaaaaattagccagccatggtggcacgtgcctatactcccagctatttgagaggctggggcaggaagatcactcgaacccaggagtttgaggctgcagtgaactgtgattgcaccacagcttrggtaacaagctgtgattgcattccagcttgggtaacaaagtgagaccctgtctcaaaaaaaaaaaaaaaaaaaaaaaaaaaagaaagaraaagaaaaaacaagaatacaaacaactacaacatattgttgaccacagtcaccatgatgtaactaggacaaactttttatttatttatttatttatttatttatttatttatttatttatttattattttaaggcaaagtcttgctctgtcacccaggttggagtgcagtggtgcgatcttggcccactgcaacctccgcctcctgggttcaaacaagtctcctgccttagcctaccgagtagttgggactacaggaacatgccaccacagccagctaatttttgcatttttagtagaggcggggttttgccatgttggccaggctggtcttgaactcctgacctcaggtgatccacctgcctcggcctcccaaagtgctgagattacaggcaggagccactgcacctggcccagacaaactttttaaaaggcaaaatatgatgaaaattcccttctggccaggcgtggttactcatgcctgtaattctcagcacttggggaggctaaggcaggagaacaacttgagcccaagagtttgagccagcctaggcaacaaactgcggtcccatctctctaaaaaatttaaaaattagccaagtgtggtagtgtgtacttttcatcccagctacacaggaggctgagggagggggatcacttaagtccaggagatcaaggctctaatgacctgcgcttgtaccgctgcactccagcctgtagaagggctatggtgatggtgacaacgatgatgacctatggctttgttgcagtaagagatgaataaaacaaggtgtttttcaacagatttcacaatttagtaaggagagtcaaatatgttttataaaatacaggaactacaggtatgtggtaagtgccacgaatgatgtataaaatgtagagaatggttttttaaaaaagaggctatggaaaaggaagcaaatcatctgattcccaagagtaggcagaatggaacaggtgtacatgggagaagaaaagcaggtgcgaggaagcaatggaacagcctctgcatcaaacagaagagcacagggcaagtttggtgcctgcctgaatagcttctacaggagggcaggggatgcaagggtctgtgctacaaaggtgggtgaggcaattaaccaaggactggacctactaaggactcacactggggttgaaggataaataaaaacagtgcttaaattatctatggtgaaggagacctattttctaaagttgtaattcatgacagactgatgtatagtacacaacccatacacagctcacatcacatgcaactcactgtgcaagtttgacaacatctaaattagttgaggccaggcgcagtggctcatggctgtaatcccagcactttgggaggccgaagcagttggatcacttgaggtcaggagtttgagaccaacctggccaacatggtgaaaccctgtctctactaaaaatacaaaaaattagccggtcatggtgatgggcgcctgtaatcccagttacttgggaggctgaggcaggaaaattgcttaaatctgggaagcggaggttgcagtgagccgagatcacaccactgcactccagtctgggcaacaagaaattccgtctcaaaaaataataataataataataaataaaacaaaataaaaaaaactagttgattccctgtacagcaagaatcaactcgtaatgcagttggatattgtggcaatgtcaaatcattatatgttactaaaatattagtcttaacttctgtacacatctcattgyggaaaagtagcaaatagttaacttgccaccacaggttggaggcccacacatgagcagctcagagatagagcctcatcctcaaatgactcacataccagtgggctgaaaccaaatatgagggcttgagtaccttgaactagagaaccgcaggctctgagcaaaattgtgcttgcttgggaggctgcacaatggaagcaaatggctcaggtagaagacaacagtcacagtgagaagaaaaaggaagggataaaagacagaaactcatgtaaaagaagagctgacagaatcagccaagagttgtgtgtctggaaaaccaatgaggtggtgttgctatcagcaaaaaaagaaatccatgagaaagaattggttgagtaagaaagacactgaactctgttttacatgtatttggttaaatgtgtgaatagggaaaaccaagaagttatccagctggcagcttaagtggaactggtctcaagaagtcaaagaaggaatagggaaagactggggaatgattaacatcaagatgaaaggtgaaaatgaagcctgagagtatatgcaacccccaaggcagaaaacatggatagaaagagaactgaccaagaagtaacagccacactttgtacaaagaggagaaagaggagaaagaggagaaagaggagaaagaggagaaagaggagaaagaggagaagggaggaggaattattaatgatgccacagaagaaataatatcaaactcaaacaacatcaatgcaaagaaaaaaataatcaatctgatgtaccatttccatttaaagggaaaaaaaattgaataaaagtggccctttacttagagaaactaagcaagactctccttaaattactccactagctttgattttaagtattaaggcagaattaggctgggtgtggtggctcatgtctgtaattccagcactttgagaggtcgaggcaggtggatcacttgaggtcaggagttcaagaccagtctggccaatatggtgaacccctgtcttcastaaaaatacaaaaactagccaggtgtggtggcgggcacttgtaatcccagctactcgggaggttgagggaggagaatctcttgaacccaggaggtggaggttgcagtgagctgagatcatgccactgcactccagcctgggcgacagacagatactctatctctgaaaacagaagcaaaaacaaaaacaataaacaacaaataaagtattaaggcagaattagaacaaacctatctgattttcccctcctcagctcaggagccaggaaggaagcagttactcatggtcatgcaacatttacagagtgtctaatgtctattctggtatttaaatatcctgtaggtgatgtcatctaaaaactcaagttagaactatgaatctgaagaatttataaagctcttactaagatttattacttccagacatttcagattgatcttatgtgtaagctaattcagatcaagaaaaatgatgtctccctacatgtaccaggtaactcagaaatcatctcattcttactacctgaggtcagtgcaagccattgtccttggctctaatgaagttctaccactggtggatgaataaaatagggctcaaattctggaatatgagggttttctaaatacaaggaactcaagaggcaaataatgttaacaatttagaaagcaagttaacaaagtgtttagagttccttatcttgtcacattccaagaaattctcaaaaatcagataaattataaccacttttacctccaaattaagaattttatatctgcaaattgctaatacttccctaggagggacaggtctgattcctttattctgaggaaaggtgaagccaagcaattctttatgggactggaatgtataggtttcctaggctgaaccatatgaaaggagaagaaaggggagcaaaaggtgatgctcctttacactgatgaaactgaacatgcctgagtacttgggaggctgaggcaggaagatcacctgagcccaggagtttgaggctgcagtgagctctgagcacatcattacactccaggccgggcaagagagcaaggccccatctctttaaaaacaacaacaaaaaacaggacgggcatggtggctcatgcctgtaatcccagcactttgggaggccgaggcgggtggatcacgaggtcaggagatcgagaccatcctggctactaacacagtgaaacttcgtctctactaaaaatacaaaaaaattagccaggcatggtggtgggtgcctgtagtcccagctactagggaggctgagacaggagaatggcatgaacctggcaggcggagcttgcagtaagccgagatcaggccaccgcactccagcctgggcgacagagcgagactttgactcaaaaaaaaaaaaaaaacaagaacaacaaaaaaaacaaaaaccaacaacaacaacaaaaaacagctctctcactcaactgggttccaatctgcaaaacaaagaccttcaagacatacatcagtgagagtttccagtaatagcaaaccctactattaatcataattcttccctctaggcagaaatagaaaaacgggcccacattcaattacccagcttgtttgccttggttaataacctactccccacccctgcaatataagccagccactcaaatgagatctatttctcaaaaatggttaccttagatccacatgtttaatgtgaggcatttttcttaaagcctgtagcctaagggtctccacacagtttccagacatacaaagtttatccacagcagtcaatttctccaatacttcgggaatgtcagtaaattcattgaaagaaagacccagataactaagctgcttcatgttctccaactcagcaggaagggattggagaaagtttccatccaacaaaaatgtctgtaagctattagagaaaacataagaattacaaagagaacatataaattttacatctttattatcaacatacaagttccataagtgtagaccgtattaccagaaaatgtattattcttcgcaaaatgcctaagggcagggcctgaggcaataatggaccaaagagaaataatcagagataagcatcttaatcttttattgaaaatgaaaatcatgactagttttcccaatttgaataggcttaaatgggagcaatgtgagctaactgtgatatgaattgattcagatatcctttgggctttccttgttatttcttaaaattaatttctaagtcttaaaattcaatataactcagaaaaatgagaacataacccacattccatgtttagacatactcatctgtagggatcttcagttctaaacaagaatatttaatttttttacaagactgtaaggagtacaaatccaacatatgaactccatacggactacatagtccctgatctcttgatttggggccaagacttacatgagcaacataacaagttaactaatctcatgtgccacacccccaatgcagcttccctggggcttctggatatacccgccagtggggtttgaagtacacacttgtgcatcactccaacggctgccgggactgatcgcagggcattgcaggacacgttcagctctgccagggttggaatactgcagactgccagwgggaagtcccctaaatgattattggaaaggttaagactcttcaacttggtgaacctattacaataaagcaaaacaaaagggaaaaaagagacaaatgtcattaacatcataattttagcatagcctaagagataatctagcccaactcccaaattcaactaaagaggaaatgggggccccagagaggttaaggagcagcagcactggaatgcacatctgctgactctaaggccagtgttttacctaaaatgtaaacattctatctaaaaacaaacttttccctctaaaataaggttgaatatttcaggaagtgaattctgctggagaaagctttctagcagtatctcaattagcttaattaacacagtgtaaatggccccagtgaaggaggaaagggaccaggcagagctggcgttagcccttctggagtcggtgctgtttcagacaagtcaaaaactcctgtttcatgtttctcaaacccaaaactgaaataataaaaacttatcaaaacaatactctctctaaggtaaccaggacttcgcagttccaaatttaagaaccaattatcagctgggcctggtggctcaggcctgtaatcctagcactttgagaagccgagatgagtggatcacttgaggccagaagtttgggaccagcctggccaacatggtgaaaccccatctctaccaaaaacacaaaaaattagccgggcctggtggtgcacccctgtaatcccagctactcaggaggctgaggcacaagaatcacttgaacctgggaggtggaggttgcagtgagctgagattgcactcctggaatgtagcctgggcgacagagtgacactctatctcaaaaaagaaccaattatcattcgtcgatctcaatacagtacttgattgatgctgctgaccacacacccttcttcttagctctcttaagccctcttctcatgtattaccttccttttcttcatcttttcttccccaacccaaattgaagtaatcttcatagataggttttttagcagtttcatgctctctctacactgttttccttggaaatgttttgactcctatgtgagcaattatctcagtcctatcacatgctggctcctctcctgagctaccccacatttccagccccaaactgaacttaccatctttattccaaactggcacttctttttcctctatttttgttaatagccctttcattttcacagttgcccaagcaacttaagcaattaaagaagctatctttaattttttacttctctgtgcactcttacatttggcctatcaacgacctctacaccatctctaagtaagataagaatcatattagtgactgcgttatgctaactcctttaaaaaccgcccacgtctaatcctagacagtatgcactctgcctagaagagacacacacactctaaaaataaacacaattcaacccaatcagtatatgttaagctgtattctaaatagttaaataaaagttgattctaaatggaaagctgaccatgtacctatttgacaggttgagtgttaccttgatttttaaataatacctgtttacttggatggctgagtataatagacttaattgtattttaaatttaaaaaaaatcacttagggaagaattattcctaaatctggataatcgtttttaaactgttttatattagggccgttaggccttcttaaagaatgcttatcctcagccaggtgcagtggctcatacctgtaatcccagcactttgggaggccgaggtgggcagatcacctgaggtcaggagttcaagaccagcctggccaacatgatgaaactttgtctctactaaaaatacaaaaaaaattagccagccatgttggtgggcacctgtagtcccagctatgctggaggctgaggcacaagaattgcttgaacccgggagacagaggttgtggtgaaccgagatcacgcctctgcactccagcctgggcgatagagcgagactctgcctcaaaaaaaaaaaaaagcctatccactattctgattatttataatcactgcaaaacacaagctagaattacagagcctcttattcctagtccagtgattctaaaagcatgcttgggggaccccagaggaggtacccgagaccctttcagaagatccacatggtcaaacttttttttttttttttttgagatggagtcttgctctgtcgcccaggctggagtgcagtggtgcgatctcggctcactgcaagctccgcctcctgggttcacgctgttctcctgcctcagcctcccaagtagytgggactacaggcacccgccaccatgcctggctaattttttgtatttttattagagacggggtttcaccatgttggccaggatggtctcgatctcctggcctcgtgatccgcccgcctcagcctctcaaagtgctgggattacaggygtgagccaccgcacctggctgttcaaactatttttataacaatactaagatgttacttgctttgtgccactttcttccgcacacctaactgtcactctcatatttcagtggagacttccagacagtacctgcttttgtaatagcatacctgatggaatacagaaagagatatgagaatccagccagatattaaaagattcaccaaaatagaagacaacgacactctggccgggtgtggtgactcacgcctgtaatcccagcacttcgggaggctgaggccggtggatcacctgaagtcaggagttcgagaccagcctggccaacatggtgaaaccctgtctctactaaaaatacaaaaattagctgggcgtggtggtgtgcacctgtagtcccagctactcaggaggctgaggcaggagaatcgcttgaacctgggaggcggaggtcrcagtgagccgagatcgtgccattgcattccagcctgggtgacaggagcaaaactccgtaaaaaaaaaaaaaaaaaaaaaaaaaagaaagaaagaaagaaaagaaagaaaatgaaaagaaaacaatgacacttttcttactatttttgttttgaaaaactgttttttcatttaaaaagttactaaaaacatcatttatgttaatatgctttattactgtctaaatgaattaatatacattaaaatatttctttctttttttttttttttttttttttttgagaaagggtctctatcgacaaggctggaatgcagtggtgggatcatgggtcactgcagcctcaacctcctgggctcagatgatcctcccacctcagcctcctgagtagctgggactacaggcacgcaccaccaaacccagctaattttttttttttttttttgtagagacgaagttttgccattttgcccaggctggtcctgaactcctgggctcaagcaatctgcctgtcttggcctcccaaagtgttagaactaaaggcatgagtcatcgtgcctaccctaaaatatttcttttctttttttgagacggagtctagctctgtcatctaggctggagtgcagtggcgtgatctcggctcactgcaacctccacctcctgggttgcaattctcctgcctcagcctcccaggtagctgggattacaggtgccgagaaccacatttggctgatttttgtatttttagtagagacagggtttcactatgttggccaggctggtctcgaactcctgacctcaggtgatccgcccgccttggcctcccaaactgttgggattacaggcgtaagccactgcacccagcctatatttcttagttaaatttataattcagcaaatatcgatatatataattgacataaataaatgttgcttaaggtcctcaatatttgagagcaaagaagtcctgaaataagattgccatatgaaacacagtacatccagttaaatttaaatttcagataaacaataaatatttttaatagtatgtcccaaacattgcatcatggggcacacttacactgaaaaaagttattcaatgtttatatgaaattcaaatttaactggtgcttcctcccctatcccctaacctaaatctggcaactctatctgatataaaatgtttatcctaggcatcacagatgaaactgctgctctagtacaaacaaaaacagcattccactttctagatatttttccccatttgagagaatgggccagttttaaaatttgcatccaattaaattaacttaaaaaaaagttcctctaggaagaaaaaaaatccactagacattatccaacataatagagcacgtgaacttttcaaagtggggaacagaaaggctgcagagctagtaattactcaagatgagaaatgaaagcattggcttttggaaaagtataggtcaataatgtggcggggcggtggtgtttaattcatttgtgcaaacaaatttactaggatgatatcactcctgaggataaaggaaagcagcaatacgctgaatgaggaaaatgcagttaacaagttttaaatggaaaagaaggcttggcggagtggctcacgcctgtaatcccagcactttgggaggctgaggcgggtggatcacctgaggtcaagacttcgagaccagcctggccaaaatggtgagaccccatctctactaaaaatataaaaattagccgagcgtggtggcgggtgcctgtagtccagctactcggcaggctgaggcaggagaatcacttgaaccagggagacagaggttacagtgagccgagatcatgccactgcactccagcctgggtgacaaagcaagactccatctcaaaacaaaataaataaataaattatttataaataaataaaatggaagagagaaaaaaaacctcttaacaagtatctcccattcattttatgtatatacgaacattgtgaaagtgataatgacccctacctctaattataaagagaaagagatacaaccattctctgcatcagctaaatgagaaaacactactctactagctttacgtaaagagaactgccctcagtcctaggtgccaagtgccccctacagaacaaggagtcgggggcaccctttcccaagagctgcaaggtccagtataataccacaagtgccaggtagcattgggcacctgaaatgggactagtcctaatggaaatgttcttgaaatacaaaatatagagtagatttcaaagactgagtacaaaaaagaatataaactatctcattaactttttagaactgataacaactgatatattggcttaaataagaatatattattgaaattacatgtggctcatattatattcccattggagaagtgccttctccatactaagagtaagcaggagactggaattccttaccctgcacaccaaccttgcctccagagcttgtgtgggttcttccctgggttcatcctcccaccagtgtgtgcacccatgtgccctagcatgggcagagcttggacatatgggctgcagtgtccacacccctggtacggtgaggaatggagctggaggaaggaagagaagaggtggggtccctggcccagctctgcccatgttatcatattcagtgcagaatcccagggagtctgaggattctaaattggaatctgtgtttccaggacattaattttatatttgacaaggtagagggagataacatattttacttaacagtttcttagcttggttataacttaaatattcagatatatggtatgtggctctccatttatactcgtaccctagacctataaattttaagagctgattctgacttaaaagtatcctcaaagtcttgctccttctcactacattccccaccccctttgcattcctccctgtgcagccaatcccccaaactcttcccagagaaggacatggtattcagcagatacttatcaaataaagcatggattgtttctgagaacttaagttcttgatctgaacgtatcaaccaacattaaaacacatctgttgtggtaactaacccttagccttctcagagttccacttttcctttctagatgtggaaagcagtcagattataggacatttgcagatccaaatactgtttcagagaaagatagaggggaggtccacagagaattcacttccctcgagtatttggaatgagtgaaacacatacttggaagcaatgtttaagttatgagagataagagatcaaaagggtgaatggatgacctttcttcactttaccttcatttaaaaagaatgcaaaggagacagccaggtgacagcaccctggtatggaggaaaagtctagaaatctctgtctctgtaataaaatataagactttcagctttgccataataggtaagccagatatttttattaattcattcattcattattttgagacagggtccactgtgtctgccaggttggagtgcagtggtgtgataacggctcactgcagtcttgacttcccaggctccagcaatcccacctcagcctygcaagtagctgggaccacaggtgtgcatcaccacgtccagctaagttttgtatttttggtaaagacaggatttctccatgttgcccaggctggcctcaagggcctgagctcaagcagtctacctgcctcagcctcccaaagtactgggattacaggtgtgagtgaccacgcttggccaggtaagccagataaatgatgaaatgcacacagacccagattccaagataaaattgactggttttaaaaagaaaaaaaaaacatacacacacacacacacacacacacacacacacacacacacacacacattttgtgaaatattttaaataattctattttaaactaatatttcagtgctaccgttgcattcaatgaggctacagatatttcttcatagctgttcaacatagataagtggaagagaatcacagcatcacagattttaagattactaaaaaatattttaatgatgattgtactaactacagtggtcggtttataatcatagccagggacaattctacttgatgctttaaaatgacaagaaacctgtggcttttaaaaaacatcatgcctgtaatcccagcatttggggaggcaaacaaaggagggaggactgtttgagcccaggagtccaagactagcctgggcaacacagggagatcccatctctacaaaaagtaaaataaaattagccaggcagggtggtatgtgcctgtggtcccagctacttgggaggctgaggtgggaggacagcttgaacccagaaggtttaggctgcagtgagctgtgactataccacagcacgccagcctaggcaatacagtgagactctacctaaaaaaagaaaaaataaaataaaaataaaaacaaaaaacaaaattcccatgttgaaacttaatccccaatgtgataagaggtacggtctttaggaggtaattaggtcatgagggtttgtccttacaattgggattagtgtccctgtaaaataaattgaagggagctgccttgccccttcagccacgtgaggacgaaaggaggaaagctgcatccttgaagcacagaatgagtcctcaccagacaccaaacctgctggtgccttgatcctggacttcacagcctctagaactgaaataaatttctgttgtttataaattatccactctaaggtaaattgatatagcagcccaaacagactaaagcactaaagcagtggatatatctttcttttttctcatgtgctactgaaaaatgagactagaaggggactttgaagtcattttctttaattttccaagctcatagataaaaaaaacaggcccagagaaactgtatgactactgcatgcaattatgaatctactgcctttcgacgtcattactacttttcatctctcctcctcctcttttattaaaccttattaaagagtttaatataaataaatatctatcactcataattctaagccacaggtcaaagaatggcctcaggaaagcactatcttttcattctcattttcccctaccaagagtagcagtatgagtaatggaggacagtgaatattctgaacactatatttaccttcaaaccaattcaagcacagctcagtgctcccaaactactcaacaacctgaaaagactgacttcattttccaggacaagcagtatgttttaaagaaagaaatataactcatgttcatttgtcctacaatacagagttcacactacagaaaggaagttaacatttatgcagcacataatcaagagtaatcttaattattaaaatgaagttatttcagtcacagtattatatttagcaaacagcaatgagcatcactcaggtctgacttactccaaaggcacgcttttagttactgataccaagtgtcacagaaaagcacaatcaactaaatatacttgataatctacagagacagaaaactgtacttgtagtatgtttgcaaacaaacctgaagtctccttcaaactaggtatcctaagtgccctataacaaagtgcaaaggctggtgccatgactcacacctgtaaccccagcactttgggaagctgaggcaggaggaccacttgaggccaggagctcaagaccagagtgggcaacatagcaagatcccatctctactaaaaaaaatttaaattagttgggtgtggtggtgtgcacctgtagtcctagctactcggttggatcacttgagcccaggagcttgaggcaataatgagctgtgatcgtgccactgtgctccagcctgggccacagagcaagamcctgtctctaaaataaataaattaaacaaacaaacaaacaatgtgcatgactgtttgccaagggtggggccctcaagtggcagaaggtcaaagtggggacagggaagagatggtagaatcaagctgatactatcactattaaattactaacactgctttaatttgcacctcctactatatttacattataaaatgaaagtacggtaataatgacaccgtacgtttatacacaaaatgtgctaaactatctaggggtgtgatctactagtgttcctaccttttccttcctttctccagcttcacagccatgactaataaatggcagagacagaacagcacacaacttcaaactgctattgagagaatagagcaatcagttccatccctgtattttcttagtttcccctgtaatctagacaacagtagaccatgtaaatgtatcactgtctacacttggctttaaatggaatttttccccagttactaaattttgaggtgtaatattccaagctacttaagcaaattatttataaaaggaaagagtgtttagtttcttaatcagaaaagtttaaatgcactaaattcatgcatccaacttccctacctttattaggtaaatataaagtttttttgttttgttttgttttgtttttgagacggagtctcactctgtcacccatgctggagtccagtggtgctatctcagctcacagcaacctccgcctcccaggttcaagcgattcttctgcctcagcctcccgagtagctgggactactggtgcatgcccccacacccagctaatttttgtatttttagtagagacagggtttcaccatattggccaggctggtctcgaacttctgaccttgtgatccacccacctcagcctcccaaagtgctgggattacaggcataagccaccacgcccggccaatataaaggtttttaaaacaagtaaaccacggttcaacaagcttatttgagtctggcctctaaaaaactagttgggagtcaatgctcattagaaaatgaagtggagccatttttatccaagggcaggaaagaaaacaaaaaagccaatgttttacagtgtcaaagttgaaagaaagaaacaaatatacacaaatgttaccaatcctcacatacttcctccttctgggcttgttttgtcataagatgtgcttaatctttttcattttcttaacacttattcaatctatactcaaaaatgtaggtacaaagctatttttgcatgtgagttacagggaatggctatatatgcttgtacatatttaggaaataaaaccaaataaacagcatgatgactatttggagacataatattaattagctttagatatatctaagtcttgagtaatttttcttccaggaactagggacatatacacttgaaaacttgactaaaataacagtatgatggaagtagttgtacttttaaacctattctaaatgtgctcaaaatgggtgtcacaagtaacacccaggaagagaaaaccatactgttttagtcaatgattctaatagagagaaatcagtattattcaccacaaatgggtcaattaaaaagactccctaggtaaataaatttccgtttcacagtaacagcccgtgtttaacttgttttttcctctgtggggcacatgctagcccactttggaaattattaggcttcagtattaagtaatgaaggagctgctcaacggctggacttgtaagcgtcgctctgggcctgccccctactttgcatcaattatgaaaagcaggatccctaatggctttgagtggctctgccttagtggggagttgccaggctgtcagtgctctgtaagactcactgtattttcttttaagagaaagattttatttgattaccaaaacaataatgctcattttaacaaagtgagtccaactatagaagcacataaaaagttaacagtctctcccacttcatttcaaatcctaccctcctgagataagcagtgtcaatagtttggtttatatccttccaaagcttttcctccttacagctgcataaataggagatagccccctccacatttttttgaatcagattataccacatatattttttctgcaaattgtttactcacccaatacaaacaaatcatcttattgagtcagtacataaaaacctaactcaatctttttgacagctgcataatacacagagtacaaatgaaccataatgtattccattcctccgctgattgacattaggagtactctcagtttttctgctgttacaattctgcaagaaacatccactgatgtatctggttgtgtattaatgattttactttacagtacttattggtgcctaataggccttatccttaattctgaaatccaagagactctgaaaattcaaagatttttaattgactcatgtgatggcaaaagctgatctgaactgatgtgaatattcatttgatctctctagaaatatgaatgtgtctacttatggggtgctctcttaaaccctgctggaggtgttacataatgtacagtatatgcaccatgttatctccatttaatctgaaaacacaattgtcctcaagagttttaataagggactgtgaatctatacttctaaaagtataactgatggccccaagagtatgtacagtttaaatatgtactacaaaactacaaaaaaaagttacagaaattcatactcccattcagtcatgtaagagagggtccctttccccatgctagcatttaatgttagcatcttttcaactgttgccaatctaatgggcaaaaattacataggtcatttcaatttttattttgcagtaaagttgagctgctttttgcaaagaagaaaatggtaattgcaaatcttctttgagatacacattcatatcctttgcccacttttctaatggactattcacctgccacttagtttgcaggcattccctgaataccacctgccgtgtactgtcaaatgctacaaacacgccctcccagcctgctgtctggtgtttcccactctgttcatggtgacttttgccacacactaatttttaatttttatttgctcatatttggcaatctcttcctttatgggatccctgtttttaattttgcttgagaaggtcctctcactccacccaaagtggtacagatgttctcttaatgtttccttctaacatgtatatatattttattttttacatttggatcctaattccacctgacatgttttacaagaaatgttagatggagggccaactattttctttctggtacctagctatgttaccaacatttattaaataagtcatcctttctttttttcttttttttttttttttaagatgtggtcttgctctctcaaaaataaataaatacataaatagataaaatcaaccttatccattcaatttaaataaattttatatactaggggaagggagaacaaaaagagaaagcttaatgcttttccaataaaatagaaaagcttgggtaaaatgagttacacttacttcatgtttctctttacttttttctaaaagaatttataaaaccaagcacatgttgttgttcttaagagcacaccttgtggttttgagaccattaaagtttgacagagtaacttttcttttttatctttagaagaaataatcttgggaagtgtatcaaagtacttttaaaaatgtgtattgaatatacttgctctttagaaactatagttaagtgaatggccgggcgcggtggctcatgcctgtaatcccagcactttgggaggccgaggcaggcagatcacgaggtcaggagattgagaccayggtgaaaccccgtctctactaaaaatacaaaaaaaaattatccaggcgcggtggcgggcgcctgtagtcccagctactcgggaggctgaggcaggagaatggcgtgaacctgggaggcagagcttgcagtgagctgagatcacgccactgcactccagcctgggtgacagagcaagacaccatctcaaaaaaaaaaaaaaaatagttaagtgaatgaatgagagacacagacccccagtaagcaacttccttttccatgaactcctcaaattccaattcctttcgtgtggtgcttctttggcttggtaagtttgtcctacagtcatgtgttaatattcttgtcccaatccaactatgatatagggcaacctgcatgtgccataatagttacataaggaagccaaataatttctaaaatgcatgagagaggctgtctttcctggatgaggaaaggaaggaacaccttttgccccatgttcctttcggactcatctgtggtggcaatggcatgagaaacatttggctcattgtgcctgcttcagaattgctgggaacacccacccttcagaaggcatgactcaactccttttggctttcacactgttgtccacacccccaaactccattggcctgtaactgaactctcacatcttctcagtttcttggtacagtgcttttcctgtcgtccctatatgacttctaaaatgaatccacatgaacttacgtatgcccttctgttccaagggccaaggagtccaccagccttgttcccagtgagcacctgccatcatctgggaggcttagcagtgcacggatgctaatgtggcaygcaaccagcttgtcaacacttgagccaaaataaacaaatcatcctatctgaatcctagtcaccataaatgcctcctggtacaagtaaaataaacatatcaccttttcatataactagaaaacaaaaataagcacatgcatattttacttaggtaaaaattaaaatttacagtcatgaaagaattttataatttttttaagaactgctacagatgttgaaaatcagaataaatttaccaaagctaaaactcataatttttcaaaagtaataatcaaagaaataaagaattctcagtgttgacaataatttccatggacattttgctgtaaaggcaaattaaagtattccctaaagagaaaaattctttaattaaaaaaaaccctttattatttattttttaaagtgatgaggtatcactgtcacccaggctagagtgcagtggtgtgatcatagctcactgcagccttgaccttcttggctcaagcaattcccacgcatcagtgtccacagtacatgggactactacaaccagccctaaagagaaaactcatcttaattcctcttttaaaataattcaaacaaacaaacaaaaaaataataattaaagtaattcaaacaagaggtacttactggttactatgtgccaaaccttaggctgggttaatcctatggatacaataacaaataaggcacagctcctgcctatggtggagagggaggtacgcagtggaaggctccatgagtccagtaagtaaattacatagagaaccactctagatcataagatggtaattacgtgaaaacagcagccgctagatctatagtaagcctgaactaactaaattcaggaaaacaatgagtcataagctgcataaatttgtcattttgattctttaataaattagcaatataagaatcaaaaaccaagaaatatgttatcacattacacttaaacatatctgttttgagatggtttctttactcaatttatccatgactacatttttttttcattttctcaccaacatatctgcccatagttagcccattaattgccaatgatattcaagagatgtttaatattaaccgccacactaggacaaataaaaatattacaataacaaaacaaaacaaaaaaattccttaaaaaggcagaaaatggatcactatttctgctcctcttctcaaaccaaaggagagaagattcacaagtatacttggataaaatcccactcaagtcacataaagatatataaaaaggaaaaccaaatagcatctatatcaaggatattggattaccaaacaaatgagaaagtgcgcataagcaaaagtcagtgagaataattaggtcataaaaatgtccttagacagtagcctaaacaccatataacaaataggctaagcatatctcacagctaaatggggaaaaaaaaaaaaccctaacacccaaaagtttcctaggtataataaaagtctgatgctagggttgaaccattattcactaaacatttcttgagttcttactatgcacaaaggtgctggaagtatacaaatgtgatttagacatggttttcaccctccaggaacttgaaacaatttgagaacaaagctcttataaaataaagcagaaggtgaaaactgaaaacttactggcggcattggggggtggggggaggaagtaccatgagtgtttacaaaagtgaaaacttttacctaaggaacatgagtaggagttcaatagacagagggggactggaagacagaccatttaaaaagaatcgtatggtatggctatttctcaaacttcagcatgcamtgttataatgcagattcttgggccccatcactgtaagttctgattcaggtctgggatgaaaaacaggcatctgtgtttctagttatcttagtctattttgtgttgctataacagaataccagctgggcacagtggctcacgcctgtaatcccagtactttgggaggccaaggtgggcagatcacgaggtcaggagatcgagaccatcctgactaacacggtgaaccctgtctactaaaaatacaaacaattagcccagcgtggtggcacacgcctgtaatccaagctactcaggaggcggaggtgggagaatcgcttgaacccaggaggcggaggttgcagtgagccgagatcacaccactgcactccagcctgggtgacagagtaagactctgacacacacacacacacacacacacacacatatccagaataccattgggtaatttataaagaaaaaattgatttctcacagttctgaaggttgggaagtccaatttcaagatgctggcatctgttgagggccttcttgctgtgtcatcccatggcagaagagcagtaagagcaagagagcaaactcacagcctcaggccctttgataatgggcattaatacattcatgaaggtagagccctcatggcctaatcacctctttaaagtcccacctcttaatactgttgcatgggggattatgtttccaacacatcaactttggaggacacattcaaaccatagcaccaataaacactacaggtgattctgatgtaggcatttcatgaatcattttgtgaaacactgatttggaaagcaaaaactacaaggtaattgggaaacattaagtagaccaaattattaaggagaaagaagccctgtggttgtaaagaatgcttaaagtctaatcacagagcatgtcaagaagacactggtatttgcctatgaaaaactttgaattgaatgaaatagtacatctgaacatgcacatatttatcacatgtatcagataatatctcccctttgttgcacttccagacacacacacacacacacacaatatgaggagtataaatatgcattctgacaaagtttaaaattaggggaaaaaaacagctatttagaaagtcagcctttccccaaggttttcttattaattatacgtccaaaagacatcaccagggaggaatgggtgtgccctgcttttacagaggtcactgtcaaatatcctgccagttctggtgtcatcatcctcaccactccagagaaatgacaagaggaatgtgactcctcccattcaaagctccattagtttagagcatggtgagtgacatcaaaattacagccactaaataaaaacagacattttcatgggtccttagttttcaaaactgacatgcgtgtgttgtctgaatgagctccagaattagatgtgtttatttgacatgaagtagcagagagagggaggagaggagtattggtctccatcagcattctcataccggcaaccaaagaattatttcagaagtcatcagcaaagatgttaattatgttcccaagtcccaagttatgatgacacttcaccatcaacaaaataagcatcagtttggtccttttactctatacttattactatgcactaggagctgtgcagagtaaagttgattaccactcagaatagcaaatatctacaaatacagtgttggcattaaactcttgcagttaagttaaagctcagagaatacggcaaagagctccacagagctcaaagaatggaagtggacagaatacaataactgaattggaatcaagccaaggcttttgaagataccagcctctctcccttctatttaagtgggaataaatgttaaagaacatcttaaactatcccaaaaagtcaayagggcaaactaatttaatatagcctggctgatattttgtttctgagctccgtcttcaaaatgtactatatgagggaataagaaaatgggccatcattgccataaattaggtcggcagcattaggcaagaagagaaccaaaggctatataatcacggagccccaagcaccacctgccggctctgctttgctcaaattctctgggaaggaaaatgggaatcttgtgaaatggaaagcttcccaagaggatcacaattccatctgaaaagcaaagctgtataagaaaggaacttccagttctgggaacagttaactgacaaaaagacattccatacattccatgaaattcctttaacatttggcaagcctcatggaaccctggtagtggaaattccttcccaaggttatctctaaccctgagcagcatttgtgctgtttttcttttacataggctttactctttcttcagcagtctgcagctggcttgcctctaacgttttttatacagcagtgtcttcaaagaagctgaaattgttctaagcgctgctgtttaaatcgatcaaatgaactgcaaaaatgttttagcatgccactctttatttcactatgctaatgaattatcactatttccattaaaagaagtcttcatgaattatgtataaaaacaaaaactaaaatctttcaataaaacctggaaatgtgggcttttggtaatgataagtaattaacattaatcactttacatctggaatgccaacatccccaaaagagcagaagagcagaataggaaataaggtcatttgttttctactccaagggraccaaaaatgtagaaatttgagctttctaagaagagaggtacttgataaatgccatgcataattaggagtttctcatcgctcatttcttcatactttcattctattatgcccacatccttgcacgcccaactccattcactctttccctctttctcgcatgagaggacctgcccctccatctctccattttcagctaaaccaaatttcacatctaatcagagctcaaatcaagtctttcctccaagtgttgaattcactcccctcttgacccaagtcatctttacttatttcaggtgaaaacttactcaatttataccacagcctctaagacacaatcacacaagcctgagttccttgaaactgatatgtaggtgccacataatgcaatgtggttgatcaataatcattctaagtgactgatgtccccttaaaatagtcaccttgaatactaaatacaagaaatggttccgctgctcaaagcatttctaaatgttctcttcctaaagttttatgatcacattattttgattatccttggtggtgggaaaaccaacaattcagttcagtgagtatttattaaggactttacagtagatggcaattttagaaatttttagatgcttactataaaaggattgataagtacaaaaaatatttaaaaagtgaacaattcagaagagcaaaaggtcacatggaattgagaagtaactaaaagcttcaaggaaaaaatgccattacaaatacactttgaagggtggggtaggagtcgctaggttgagcctgggttcggcaggtggtcaaaggtaaaagttggggcacattcttgcaagatgagtggcaagagaatgtgaagtgagtttagagaatggtaaaataaaccatagatttttttttagaagtccagtttcatacggtccattttaaaactagtatctccttttccaacttcaaatcctctcttacatttttctacgtaaggttttctgaatcatctcactgtgcatattgtcttttatcatactttcaaccaaagagaaatacaatgataaattaccagtctcacttccttctaaaagttgctacaggccgggcacagtggctcacacctgtaatcccagcactttgggaggctgaggcaggcagatcatctcaggtcaggagttcgagaccagcctggccaacatggtgaaaccccgtctttactaaaaatacaaaaattagccggatgtggtggcgggcacctgtaatcccagctactcaggaggctgaggcaggagaatcacttgaacgcaggaggcacaggttgcagtgagctgaaatcgtgtcactgcactccaacctcggggggaggatagagtgagactctgatctcaaaaaacaaaattaaaaaaaaaaaagttgctacaaataccttttgcaaagaagttgctacaaataccttttgcgaagaatacataaaattgaatgaataaaggcacttcccccaccattcactcaagagtgcgttcatttatggagtatctatttaatgctcacctagcaacagtaatgacctctgagggggacttgattcctgccctctcagaatgcaaagccaagcagagcacacaagataaatatagaaaacaaaggtgataaaagttaaggccatactgctattcccatgagtcacagtatctttacaaaaacaggcttaactattacacagaattttataaaactgtcaggggacaatagtaacacacaatggcaaaattcaatatccaaaggagaatgttaagaaaaacaaaaacgctggtggtatacttttttttgtcctatttccatatcatatatgataaaaatcacattaagaattctataggccggacgtggtgcctcatgcctgtaatcccagcacttcaggaggccgaggtgggcagataatgaggtcaggagactgagaccatcctggctaacacagtgaaactccatctctactaaaaatacaaaaaattagccaggagtggtggcacgcacctatagtcccagctactcgggaggctgaggcatgagaatcgcttgaacccgggaggcggaagttgcagtgagccaagatcgcgccactgtactccagcctgagtggcagagcgagactccgtctcaaatataataatcataatcataatcataataattctacagatacatagcaggtcctcgaacaatgtcatttcattcaatgtcatttagctataatgttaatgaggaaaaaaatcaattcctggtgaggatcgctgtctgtgtgaagtttgcccattctcctccgtctgtgtggttttcttggggtactcacttcctcccacatcctaaagctgtgcacattacgttcaccagtgtgtccacatggcaagtgagagagacagagagagacagagagcgagagtgtgtgtgtgtgtgtgtgtgtgtgtgtgygtgtgcgcgcgtgcgtgcgcgccctgtgatgggatgctgtcctacccagggctggttcctgtctggcactcttagctgccgggagaagctccagccaccagcaacctgaactggaaaaacttggtaaataattgcccttttttgtttgttttttgagatggagtcttgctctgtcacccaggctggagtgcagtggcgcaatctcagctcactgcaacctctgtctcccagggtcaggcgattctcatgcctcagcctcccaaatacctgggattacaggtgcgcaccaccatgcccggctaagtttgtgtatttttagtagagatagggtttcaacatgttggtcaggctggtcgcaaactcctgacctcaggtaatctacctgccttggcctcccaaagtgctgggattacaggcgtgagtcacctcaaccggcctatatcttacttgtttttattaatcttttttttttttttttgagacagagtttcgttctgattgctcaggctggagtgcaatggcgtgatctcggctcaccacaaactccacctctcgggttgaagcgattctcctgtctcagcctcacgagtagctgggattacaggcatgcaccaccacggcccagctaatttttgtatttttagtagagacggggtttcactgtgttggtcaggctggtcttgaactgctgatctcgtgatccacctgccttggccccccaaagtgctgggattacaagcgtgagccaccgcatccggccctttatttatctttcttaagtatatgcatagctcatatttatttcaatgcttaatattaaaagcgttttgatctttatttagtagtttcgtggtgttgtaaccagaaacatgccctaagaacttaactcttgtttatatcaattaacctatggtaaaactggtttcattacatatgaaattaaawgaggagttactgtacatgatttatcaagtcatttaaaataccaacttctactgaaattatagtgctagccctataaaagtaattccatttytagaaccagctaggaccttctagctgtgctagttttgtttctctataccaatttacttacaaacagcaaaagccagaaagatccatctggatccacttcctttattaatggaagcgataaccaccaaccataaacaaacaattgaaacattataataaatttctatttatgaagtagttattttataatttgtctaatttccacacatagaattaaacaatttaagtgtattttaattgtcaccaatttggcaagtacttactagaacacaggcttctttcttaaactggttggtataagtaactagtaattaaaatagtctaagataaagacattttagttgaacttaagtgacaaactttccaagtaccatggacaaagttactggaaacacacacatacaaattattactatcaaactttacttttgacttcattctcctatttctttttctaaacatggcaggatatcaccataaaagaactctctatcatcccttatgaaggactgcagaatacgctaccccaaaatataccactttggcataaggattatactgggccaaacgcacttgaaaaacagcaggtgtaaaaaggagtgctctgacctccccttttctttttctttttttttttttttttttgaggcagagttttgctctgtcgcccaggctggaatgcagtggctcagtctcggctcactgcaacctccgcctcccagattcaagtgattctcctgcytcagcctcccgagtagctgggactacaggtacccgccactacacctggctaatttttgtatttttagtagtggcgggattttaccatgttggccaggctggtcttgaactcctgacctcaaataatccactcacctcagcctcccaaagtgctgggattacaggcgtgagccaccacgccccacctaattttttttttgagactgagtctcgctctgtcccccaggctagagtccagtggcgcgatctctgctcactgcaacctccacctcccgggttcaagcgattctcctgcctcagcctctggagtagctcggattacaggcacccaccaccacactggctaatttttgtagttttagttgagacaaggtttcaccatgttggccaggctggtttcaaactcctggcctcaaatgattcacccacctcggcctcccaaagtgctgggattataagcctgagccactgcatctggcctctgacctccccttcttgaaatcaagaaacaaaactcccttgtgaaagatgccctctatgtagcaggaggaaagcaacattctgaccacaagagacggaatggaggctaagacaattctgtacaaacatcatttgttaaaataactcatcttcctttggtctccccatatatttgacttacttttccacaatttcttctgggttcaacctagtacataagcacttagattttgtcacttctttaggtcttcattttcccatgggggttcctatgcacatgtaaaaatctgtatacttttctcctgctaatgccttatgtccatttagttctcagaaccaggtggaggcttttagagggtacgggtaaagttttgcctcctctatatttacaaactctaggtccttcaatgatcctccctatacatccttaataaatgataaataaatggcacatttataagagctaggccaggtgcagtggctcatgcctataaccccagccctttgggaggccgaggcaggcggatcacttgaggtgaggaattcaagaccagcctggccaacatggtgaaaccccatctctactaaaaatacaaaaatttgctgggcgtggtggcgcgtgcctgtaatcccagctactcaggaggctgaggcaggagaatcgcctaagtctgggagatggaggctgcagtgagctgagatcacgccactgtactccagcctgggggacagaccaagactgtaaaaaaaaaaaaaaaaaaaaaaattttcagagctaaatttggccaggcgtggtgactcacgcctgtaatcccagcactttcggaggccgaggcagtcagatcacctgaggtcaggagttggtgaccagactggccgacatggtgaaactccgtctctacaataatacaaaaattagcccgggtgtggtggtgcacgcctgtaatcccagttacttgggaggctgaggcaggagaattgcttgaacccaggaggcagaggttgcagtgagccgagattgcaccactgcactccagcctgggtgacaagagtgaaattccatctcaaaaaaaacaaaaacaaaaacaaaaataaacagagctaaatttgaatttaccagggcagtaaaatgttcaaacaccattataatttagtgtgaataagttcatacagctttgctatcatattaaaaacataaaattaagacatgggggaaaaaatatattccttaaatttaaatcagcaaaaagttgtcttcttcactgactctacaaagaaacttaccatattttatgaaaaatcattctctattgcaaataacaataatcttagtattaagactatctgagtcatctagagatatagttaacataaatgaagcactattaataaaagagataaacaatgtattatagttattagtgacacatataataaggaaagaaaccatcaacaccaccaaaaattaccctgatgtttgcctctcctctatattttgaaaactaacttgaagagttccaatgccaataaaggaaaaacaaacagcactagttccaagaacaatgttttccctctgaaactgctgacctgtgtgtgtacatcagcatgccatctttccagatttagaatgttggtgcaaataccaatttaaatgttctgtgaaaatagctcatttgttaaaggtaaaaatttgtagtagaaagaaaaattaaggggatatgtgcttaagataaaatgtctctgaactcctacctgttataattatattgtactttaagtttctccctggttatttgtcctaacattgtaacctaaaacttaattccttgaaacttaggtaaaaacgtaaaaataaattaccctttggcatctaaaatgttccctgtgaaacatacattagagattaccacaaattcctaaacacacaaataaaaataagcaactaaatatatggcatatttcgaagccaccacactaagtgactggacatttaaaaaccacgttaatgctttctgcagtactaacatgactttcttaaatacacattatacatttaattcctggtattaaatatatgtatataagaggggggtatatatgcatgtgtgtacttatcaacttattactctggaatcttagcaataaaaatttttcttggacaatggaagtgggagacaaacacctcatagtagtgtgtaatgaaagagaaactggtggccgggcacagtggctcacacctgtaattccagcattgtgggagaccgaggctggcagatcacaaggtcaggagttcgagaccagcctggccaatatggtgagacccccctccgtctctactaaaaatacaaaaattagccaggcgtgttggcgcgcacctgtagtcccatccattcgggaggctgaggcagaagaatcgcttgaacctgggaggcagaggttgcagtaagccgaggcgagatcgtgccactgcactccagcctgggcgacagagcaagagcccgtcttaaaataaaaagaaagagaaactggtataaagcctagttttttacaaagagcagcaaaacagcagcttcaccagttactccgataccacataggaagtcccctaggcctatcttccccatgcttaaagcaacagaaagaacaaaacagaaatcttttattgcagtgtaaaattttaaaattctctaccttaaacaaatcaaaatcactgccttatattacacagtacaaagtacaagctgataatatgtcacttggtatgctttgttttgcttttttaaaagaaaagtcagtgaaagaagctggactcaaacacatattgtgtgctccatttagatcaagtacaaagacaagtgaaactacttcatgatgttctaagtcaggatagtgatgatgtttagggtaataaagagaagggtacaaggacagcttctggagtgctggcaatattctcttcctcatatgtgtactggttacatggatgtgttcactttgtggaaatccatcaagttatacactcatatctgccttttctatgtttttttatacttctacaaattttcaaaaggttacagaaggaggagtaagaccccagatcctctccccaattccagcagaggacagtttattccctggaagaaaacgaaccagagtccctgattcaaagacatcaggcatactacatcacagcatgacaaacagggaaactgctttcttcggcccttcatttgacccagggaggtaatttggaagaaagagaatagtctgtcaaagcatcagggaggtaatttggaaaagagagaatagtttgtcaaactatagagcaataagagaatgaaaaccactgagttaatttcttatttagttatacatacagcttgagtattctcaatgattcttcttcatcttgagattttaaacaacagctgaaagatggctcatgtccagtgacttggtttacttttatattcaaaatatttcagtctcagtgtaatatactcattttctgagatgctgattattgaacatatgatctctaaaaagataattccagaagtccatctgggtagcatcaaagactcctttatctcctttcataccacatggctcagtaatactgtcttatcagacatgtgttctttgcaattatttttctgatcaatgataggtttgggaaattagagaaaataaatgtcactgaaaacaaagtattaactaaatttgtacatttaatgttaatgtttacatatacaattttaagatacaactttttttttttttttttttgagacagagtctcgctcagtcactcaggctggagtgcagtggcgccatttcagctcactgcaacctctgcctcccaggttcaagcgattctcttgccttagcctcctgaggagctgggattataggtgtgcgccatgacgcctagctatttttttgtatttttagtagagacgggtttcaccatgttggccaggctggccaacatgacctcaaatcatccacccaccttagcctcccaaagttacaggcaagatacaattttcatctaaaatagtctgaagttatcccttattgatttggtacacatgcaatgctatagaaactggcttatggaagttaaaatgaataagacatgattgtcaaaggatgacggtataatctgtagtattgtttaattctttgtaattacttaagtgtcaaaatatctctcataaattgaaaagaaaaaagttatcaagcataacagaaaacactgttctgaaaacagggaagttaaataaaaatccacatatggccgggcacagtggctcacgcttgtaatcccagcactttgggaggctgacgcgggaggatcacaaggtcagaagatcgagaccatcctggctaaaacagtgaaaccttgtctccactaaaaatagaaaaattagccgggcgtggtggtgggcgcctgtaatcccagctactcaggaggctgaggcaggagaatggcgtgaatctgggaggcggagcttgcagtgagccgagatcgccccactgcgctccagcctggacaacagagccagactccatctaaaaaaaaaaaaatccacatactaaaccttgagattcttcctctcttttccactcattaccctaaatcttggcatgcatcgccgtggcagaataccaaagggtttctctagtaaactgacaccccctgaggaaaaggtccacacactgtctttgctgtgtagcaggccagaagaacaagcacataccctggctccaggaagaaaaaagtctccaagaaaaaggtgctgagaggaatataagaattccgtcagaaagcttacaaataccaggggaaaaagaaaagtatacaagtgataaagtgaggctgctatcaagccagcacaagaaaggaaatataatcactgcaattaaatcccttagctgtgaataagttccaggttcataataacgtaaacagtgagtactgacttaaccaaaaattaacacctatatattgagaggataggggaaagagaagttagtacatgtggtgtggggtagatggggcgtgagacaatgtaaatgaatgaaatccttatcttccatagtaatgagtcaacatataatgtccaataatgaaaaaatcaaaacatagcagtatacacataatatttagaaagagaaaggaaaacggcagaaagagccaaaagattcaaaagggttgtctagggagcaggacttggatgtagggatgggctggagcttcaggcacctacttcttattgtaaacttcactgcttattaagatctttaaaaatctatatagggtgttactttgatgaaggaaaaaggcttaaatttttaaaaatacaaaataaaacaaaaccaagaaatgtaaaaaacagtgggcaacaaaaatagggctaacctgcagagggaaaatgacaacaagacaatcagctctcaaaggtagcgcaacagaccaggtgagggttgagaagtacttttactataacagctggggagagagggtgtgtgcagtagagggatgggagcagaggagaaaagaggatgagctcaaaagatatcacacagaatcaacagacatgggggatcaagtcggtgactctgtaagaactaaaaggcaagacagaatctgaatcctcctgaagtgggtcatgcccaaaatatccctccacctggatatttattccacaaatactggctctttgggagcattttaattttctttttatttaggtttaaaatgtttggattattatgaaatactcaaatttaaaaaatgcagaaaactgtaacattcatcggcattaactatacagcgttttaaaatactaaccttttgggccaggcgtggtggctcatgcctgtaatcccagcactttgggaggccaagatgggtggactacctgaggtcaggagtttgagaccagcctggccaacatggcaaaaccccgtctctactaaaactacaaaaattagccaggcatggtggcgggtgcctgtaatcccagctactcaggaggctgaggcaggagaatcgcttgaacctggggggcggaggttgcagtaagtcaagatcgcaccattgcactcccgctgggcaacagagtgaggctctgtctccaaaaaaaaaaaaacaaaaaacacaaaaacaaaaacgttttggcctctcatttttctttttaaagaaataaacgttacagatatagttgaaaccttgttcaaaccattcactaatccccatcccccgtctccctaaaaggtaaccattaaactgaatttggcagttaacatccccatagaccccaactttaaaagagagcattaggttggatgaattttttttaacttttattttaagttcaaagctacatgagcaggtttgttacacaggtaaacgtgtgtcatgagggtttgttgcacatatatttcatcacccaggtactacgcctagtatctgttagttatttttcctaatcctctccttcttcctgccctccagcctccaataggccccactgtgtgttgttcccctctatgtgtccatgtattctcatcacttgacacccacttataagtaagaacatgcagtatttggttttctgttcctgccttaatttgctaaggataacagcctccagctccatccatgtccctgaaaaggacataatctcactttttatggctgcatagtattccatggtatattaagtaccacatttctttatccagcctatcattgatgggcatttgggttgatagtctggatgaattctaatgcaccattctgttctaagacatcaggatttggcagtatgatagaaagcctttgatgttctatgatagaagtgcaaaagtctacacttctgtgaaatatgcaaaaatacttcccaataatttcaaacctcagaacacactgattgatgatagttcatgatgggtagctccagaaacaaacaaacaaaatgataataatgattataacctttcagccaaaaagaaaaaaaaaagcatattaactttactgttgtagtgccagtacaactttttattttatttttgagacaggttttccctctgttgcctaggctggagtgcaatagtgtaatcatggctcaccgcagcctcaaactactgggatcaagcaatcctcatgcctcagcctccccagtagctgagactacaagcatgtgctactatacccagctaatttttaaatttttctttatagagatggggtctcatgacattgacaggctggtttcaaactcctggtctcaagccagcttcctgcctcagtttcccaaagtgttgggattataggactgagccattgcatccagccagtccaaaattagtaacaatacatagagcatataaaacctaagcttaagtattttgcaaacaaatcagtcctaccatttgtctttggtgaaaatgcgagactgaagacagaaaaattatgtttaaagaactgtggtatacctgttattagattctagtatcagttgtttttgaggttttttcctgcaatttagactaatcctacttattcctgtgaaccaaccagtgatctctgctgctgctcagaagaaataaaagggatgggtaatgtaaaaatcctgatcagtattctaattctgggcaggtactggaatcagccagggaccccatatcagcttggttccacaacaactgcctagttaatagaaagccttcttatttagtttacttgggataattttacttattttgttttactgttgtagaatatattgctgttgtactctttgtgtaggaatgcagataagcttactgaatgttttcttaaattgaacacttactattcttccagatagcacctcttgttggaactcactgttatcaatggccctcgccagacctacgctttgtgactgacctcctctctaccttgaatacaagaggccctcatagttaggtaggaatatcattgtccctattcagcctgaagaagttacagaagatggatcttcattcctctacaacccttaggattaaagatctccttataaaagggaggggcagccaggtgcagtagctcacgtctgtaatcccagtactttgggaggccgaggtgggtggattacctgaggtcaggagttcgagaccagcctggccaacatggtgaaaccccacctctactaaaaatacaaaaattagctgggagtggtggcgggcgcctatagtcccagctactcgggaggctgaggcaggagaattgcttgaacccgggaggtggaggttgcagtgagccgagactgtgccactgcactccagtctgggcaacaggagcgagactctgtctcaaaaaaataaattaattaaaataaataaacaaataaatttttaaaaattaaaaaaataaaagggaagggggaaatatgtcagaggcattcgaacctgagtgactccatcttgaataggggctgggtaaaataaggtttacccctactgggctgcattcccaggaggttaggcattcttactcacaggatgaaataggaggtcagcacaagatacaggtcacaaagatcttgctgataaaacaggatgcggtaaagaagctggccaaaagccaccaaaaccaaaatggtgatgaaaagttgacctctggctgtctcacggctcattgtatgctgattataatgcattagcatgctaagagacactcccaccagcaccatgagtttacaaatcccatggcaatatcagaaagttactctatatggtctaaaaaggggagggacccttagttctgggacttggctacccctttcccagaacactcataaataatctaccccactgattatatttagcatataatcaagaaataaccataggctgggcctggtggctcatgcctgtaatcccagcactttgggaggccgaggtgggtggatcacttgagtccaagagttcaagaccagcctggcaacatggtgaaaccccatctctactaaaaatataaattctagctgtgcgtggtggtggtgcatgcctgtaatcccagctatttgggaggctgaggcaggaggatcacttgagcacgggaggcgaaggttgctgtgagccaccactgcactccagcctgggtgacagcaaaacagtgtctaaaaaaagaaagaaagaaaagaagaaagaaaagaagagagagagaaaagagagagagagagagagaaccataaaagtagccaaccagcagcccttagggctgctttgcctatggagtaagccattctttattcctttactttcttaataaacttgctttcaattaaaaaaaaaaaaaaaagaataccacagtgataactttcatagtacacgtcagctacaggggacaatcaggaattgctggagcaaaatatccttattagagtctcgattgcctacgtaattaattcactgcagcaccaaactgtcccagttgtcattatattcttctctattcttttcttccgggcaatattaacagtaaaaatattctttaaaaaaattgtaatgccagttttacttaagaatgtccttgatgacacacgaaagttatttcttattacatctcaacccctgagtatatgtctttttaattttctgggtgataaaataggaagtacacaaaaaacacttctggtgcacactgaagtatgatagtcatctcaaggaaaacacttatctgattatgtgagctgtgggccaaaccagtcgctatttatagagaaccccatttttacttgaaagagcaactgacaaactattattattcatacttgggtatttggcagacattttctcaaaaatgaagtgagaagtctgcttaccagaaaacaactgatggcatgtgctgccaataatggccttcaaatttctaatgaaaaattaaaattttggaaaactcgtttccacagtaagcttaacaacatcccaatacttaaaagactttactgataagatcagtggtgatattggctgggcgcagtggttcacacctgtaatcccagcactttgggaggtcaaggtgggcggatcacttcaggtcaggagttcgagaccagactggccaacatggtgaaaccccatctctactaaaaatacaaaaaaattagccaggtgttgggggagcgcctgtaatcccagctacttcagaggctgaggcgggagaatcactagaacgcgggaggcagtggttgcagtgagccgagattgtgccaccacactctagcctgggcgacagagtgagactccatctcaaaaaaagaaaaaaaaaaagatcagtggtgatattaacaaatgtgaattcttaaaattccataataaaatacattaacatttggagtatctgtgttacacaacggagtagtactctccaaatgaccaacacttaatgcaataaagtgatgcatgggtaaagagtcaaatcaaactgcaagtcagatcaatggatcttaccgttaaagaattcaaaaagctcacgaatagggttttagattccattttagaactaacatttaagaaatgaccacttgtcaagttttggtatagtatcaaggaaggatattcacaattacctgaaaagacaattaaaatactcttccattttccaattacatccacaaactttataagcaactattggattattttttctggatgttaaaaaccataaacagaatcacaatggttatcacattttaattcctgatcatatcagtcatgtaaaaacaaatgaactagcaattatttatttaaaagttatattctttgcagttacatagtcttacatatttgcaacaaatatataagtatcaaaggtttaatttaccacagaatgaagactgatcactgctccaaagaggaaaggaagtgaatgtggtaaattcttaaatctgttttggagacatgcaagtcaagtccctctcttctagtttaaatgagcagattctaggccaggcgtggtgtctcacgcctataatcacagcactttgggaggccaagaagggcagatcacttgaggttaggagttcaagaccagcctggccaacatggtaaaaccccatctctactaaaaatacaaaaattaagagggcgtgggcgcctgtaatcccagctactcgggaggctgaggcaggtgaatcacttgggcccaggaggaggaggttgcagtgagccgagatcatgccactgcactccagcctgagacagagcaagactctgtctcaaaaaaataaaaaataaaggagcaggttctatttatttaacatgtgactcctgaaacccacacactaatcacccagatgacatgatgtaagttgatttaaacgctggttcttaaatttctaaggaaatatctttttatgggaaaaaatgacctttcataaatttcaaaagaaacaatttaatctgaacaaacacctgaagttcagaagtaacacaccaaatgttattaattttttgcacatgcatttttagataggaataaaagttgtttaaggagaattgttcttacacaactctatccagttaataaatatcataaatcattagtttcaaaagcaagaaccttaaaaaaaatttcagattgagaattggtaatgtcttcactaataaacaaagtcctattaccctgttatctgaaggagaaagtttacacactagcttttttcatgagaatattcaagagataacaagcagaagttcattctgcccccaccccttcctaatgatctacccatttctgcaggcttacctttgcagttcattaagccccctggcagctggaaggctagggttctgccttaggaagttttgttttaaattgagatgagtgaggtcttggctgtagaagaggttggcaggcagatgttccaggctacaacacgagaggtccactgagctaatgcgctgggatgcaacctaaagggggataaaacttaattttaataccatccacttatcctataactactttctatggatagaaataagataatcccaatttggaacagatattctatgaaagtagcactgttagtccaaatataaaccaacagagtattcagtcatgtgccgcataccaacctttcagtcaataacgtaccacacacagcagtcccacaagattataaagaagctgaaaaagtcctatcacctagtgatatggcagctatcataatgtcatagcacaacacactgccttctatgtttagatacacaaatatttaccattttgttacaactgcccacagtattcggtacagtaacatgctacacaggtttgtaacctaggagcaatagcctaggtgtgtagttggctaacaccatctaggtttgtgtaagtacacactgatgtttgcaccatgaagaaactgcctaacaacacatttctcaagatacatccctgtcattaagtgatgcatgtctgtacttagtatttgagccaagtactttataaaagcaggaaaatgtccctgcctggagggtatgtacagtaacctagcataggagacaggctggaaagaacatagattattccatcaggtttagtgatatcagtaatctcctccaatgcaggagttttattcctgaaaacataaggaataattctctccgacagaaagagaattcagagctatcgagtaaatacacggtcaagagacagatactaagatctaaactgaacatataaaagccattgtatatactgatttaaaatagcacaaataaagaaaaagaacaagacctttacactgaccttgtacacatcttcaattaatggtacagtagaatcagattccattgcctgtctgctacaaacttttcaggctgcctctcccagtttcagtgaaatgcttacaaattcattgtgctttgcttcatgtaagtattttatgtaaaacttattttatgtctaaatatttatccagatgttcaatgccttcctggttaaatgactcctcccacagccaggatctcagggctaaagaccaacttttatgtgggaagcagaaaacgcactgaccaccctgtatttctcaaatgctcttcccaatattgtaggtaacacagtgccaatttatgctaaagcacatggcttcagccccacctccacacatcttggttttctctcctcacagaggcaatgggagtacagttctaaaactttggttaattctccctatttatctttaccaaagctttagggcagaaacttcactgcttctctgtgatcagtctgatctctttttcttttaccaaaccccaggtttctgttcctaattacacaaggcagtagaacgtagtccttaggtgtatggttctgagttcagtgtccagattcatagcccagcaccaccactcaggagctgagataacttgaatagatcactgatctaagatccagttttctcatctgtataacacgtataaagatggtacctacttctacatgcctggcacagaaaaagcactcaataaatgttaactgctattactattactagtactactactaacactaccatttccaaatcaaatcattcacattttattttttattaaaaaaaatatttttagataataaagtaggggcaaggtcttgccatgttgcccaggatggtctcaaactactaggctaggttgatcctctcacgtcagcctcccaaagcgctggattacaggcatgagccaccatacccagcttcattcacattttatatccactaaaattcatactctcctgatgctaaaagtatccagaagtaaatctgcctaagatatgttctgctagatcaggtatggtggctcacatctgtaatcccagcactttgggaggccaaggcaggtggatcatttgaggtcagaagttccagaccagcctggccaatatggtgaaaccccgactctactaaaaatacaaaaattagctgggcgtagtggtgggtgcctgtaatcccggctactcgggaggctgaggcagcagaattgcttgaacccacgaggcagaggttgcagtgagctgagatcgtgccattgcagtccagcctgggcaacagagagaggctgtgtctcaaaaaaaaaaaaaaaaaaggttctgctgatggaatatttgagcttaggagaaactactgtgcacacatgaaagctaaaggtatactggggtgagaaaggctgggcaggacttatctctaaagactttactgagaaagtctgagtttgcattttaccaattttatctttctgtgaattttcaccattaaataagaaaaagaaacttccaaacagggccaaaccactcatataaagaaagatgtaaaaagagatagaatgttaatgggcctgaaagtaggtgcaaaagcaccacgctacacaggattcctacggcattcataggaagtggatgggaacctgtttatagaaagtgagtttgaaacctctgctagctagtggaatcattcattcaaaaatatgtgttgagaatctacttaatggtgtgtggcaggccttttatttcctgagacacaaaaggaaaacaagacagacacagtctctgccctgaatgagtacacatcaagaggagagggtaattaagatactacatgataactgttacaagaataggaagtgcaaggacacagaacagaatcccaggggtcagaaaaggattcccagaggatgtaatatccaagcccaaacttgaagcctcagtagaaatctgtgttttttgccccaaatcctttctccttcaaactcatgatcctaaggggaactgcaaacaaagtacccagatgctctggattcgtgggtaagcatgcactccaggtctgagcaatctgagtgtcctatctgctgaagccacagactgatccaacaggtgctagcatgggacccaagctaggttaatcagaggacttctctgggatttacatattctgaaaccaggaaagaaagagaaccagctgcttagagctgcagttaaaatgaaggaactagatccatatgtatcaatctgacttgatacaaatgcaaactgcagcatgacacattccatttatgaaaacaatttttaatacaatacacacacacctccatatattagatggatgaatagttatatgtgcaatatataccgtgagatcataaatttctattgttttaagccaccaagggtttgctaatatgttacagcagccacaggaaactaatgcaacccttctttattttttccattgtactttttttcattttcattcattcaacatgtttactgaatatctactagaggtgccaattaccgttctaggtgagcccttaatatacttcagaaaacaaaatgaagatccctcccctattaagctttctttacaaataaataaattatatgttaaaaaaattggtaagcactacagagaaaaaaaaaacagcttgagaaagggggtcaagactgctgggaaggtggtggattgtaatttaaataggttggtgagagtggtgcccactgaaaagaccacatttagaaaggaaaaaccggagaagttggcagataggatttatctggaagaagatgctgccaggcagaggaagtacccagagttaggacccttagagaagcatgccttagctaggcatggtggctcatgcctgtaatcccagcactttgggaggctggggtgggaggactgtttgagcccagaagttcgagatcagcctgggcaacatagtgagaccaccaactctactaataaaaaaattttttaattagctgggcgtggtggtgcgtgcctatagttccagctactcgggaggctgaggtggacggaccacttgagcccagaaggtcgaggttgcagtgagctttgatcacaccactgcactccagcctgggcaatacagccagaccctgtctcaaatttgtaaaaggagcacacttggcatgtccgagggacttgagaacactgataataaggagacagtgactggcaatgaggtcagaaggtaagggggcaggggatatggggtaagcagcagatcctgtgggaccctcaggccttgtaaggactctggcttttaaggtgagtgaaatgggatgtgtggaaaggttctgagaagtgtgaggtgatcaccaacatatggtcggcgctccatatccactggggattagctcctggaccccagcaggtatcaaaatccacggatgctcaagtccctgacataaaatgccatagtacactcagccctccgtgttggcaggttttgatccccggttagttgaatctgaaaatgggaaactcgcagtaagaagggcctactgtaccatggaattttcttattttttctctatctttgtctctagattgtaagctccataaaggaaaggatttttctattttgttcactgatataaccccacgttgagtacttgggaggaccctcaaaacatcttgctggaagaatggccagaagacgaccttatacctcctcctttctcaccaggcggcctctgcatctagtgcatcctttcatttggcaaccactttgaagaagacaaattccatttcaaatgaagcatcccactaaatactccctttggacaactaagagaaaatgatttaacatcaagttgtattggcttcctttcctccttctagaccgtaagctgtttctgctggaaacaaggaggaggaaaccacattaacgaggctacaagcaagggcagtcctgtgtgagctatgtagaactaggaatgtctatcgtgagaacataaattcaacatgttaatatggccactaggcagtgagctgcataggtgaccacaaaagctaccactagctacaccactgcccagtcccataagctgcaacagaatgggagatttaagtgcttctactcagagcaacctgggcacatcagggctctatcacaaagagttaagaaccaggaaagcactctacttagaaggtatggcttgattcccaaatgagaaaactaccagctgggctatccaaagaaactgtgacccacctacacagcagctattaaaactgagatcctgcctgaaataagaaagacctacatacataaaaaaaattaatcaaaaaaccacatgtgcacacctcagagcaagtaggctttattattctagcgttttccttttccaagtaacaataataatagttaacatttaagtagtgccttctttgtgataggcactcttccaagagcttaagatacaatatttagcttaatcttcccaataccctgtgcagtaagaacttacccctgtttcaaagataaagattaaactgagtcacagagtgtgcgcccaaggccatttagtttaaaaagcagcaggatcaggctgggtgtaggggctcatgcctgtaatcccaacactatgggaggccgaggtgggtggatcatttgaggtcaggagtttgagaccagcctggccaacatggtgaaaccccttctctactaaaaatacaaaaattaaccaggcgtggtggtgggtgcctgtaattccagttactcaggaggctgaggcaggagaatcacttgaacctgggaggcggagattgcagtgaaccaagattgagccatcacactccaccctgggtgacaagagcgaaacttcatctcaaaaaaaaaaaaaaaaaaaagtagcaggatcagagtttgaacaagagccagtactattaactctatgccatcaggtcaagacctggatctcatcagaagggaggctcctctaatctccatcataaaataacataactacagcaaagaaaattagatgtactcctcaggatatgtttaagccttagaaatgaagacaaggtggtcagagacagtgagtcctcctcgggagaagcagtagagaccatctgctgaccaaatacagatttccgaggaggggtgaatccccatggggcattattccttgacatcataggctctgcccactccaatcccacacaacttatccagctgggcaacagtgatgccatccagtgagcacctaatcaaaattttaaaggttacaggaaaagtataagaggttatagatatttgggaagtgaaacaggcatatatagaaagtgcctcaaatctctgttacagaaagcttctaaaggatctcagaatataaattccttttggcaaaagctactgtacttataaccacagacaagatagttgaaggcacaaaggtgaggtccacacaacttgacatacaggagaaagggcaccagcttaacagtatgtggggtaggtaggaacagttctacttactagcaacgtgactttgaataagtcacttcgcttacctgtccttcaagtttccgtatctctaaaatagactaagtcctgtcttatagactaatagacctgccctgatcaccttaacaagttgctgcagtaataccattttattcattttaaaaaatcaggagaggctctgtagaccaagtatctccacagcaatgtctaccactccaagcaataaaagtctataaaacaaaaaagactacgatgtaagccaatgctctcgtcgttgagcagttataaggataaactgcaattagccagaccatcaatgaactatagacgaagagattcaagttgtgatcagttgaaggtaactgtgccatagaaagtcagttttagtctgtattaacaataacaggctgggggcagaggctcacgcctgtaatcccagcactttgtggggccgaggggggcagatcacctgaggtcaggagttcgagaccagcctggccaacatggggaaactccatctctactgaaaatacaaaaattagctgggtggggtggcgggcacctgtaatcccagctactcaggaggctgaggtaggagaatcgcttgaacccgagaggcagaggttgcagggagccaagattgcgccactgcactccagcctgggcaacaacagcaagactccatctcaaaaacaaaacgaaacaagaacaaaaaaaaaaaagaaaaaagaaaaaaaattaaggctaattgagttagtaaattaaatgggacttttctaccacgatggacacaccctgagagatacatcaaaatgaacataatttccaactacctgctcaggtggtctctttttttcccaaatgacttgtaaatatacataagggaaggagggttcatttggtcctcaaaatatttcctctaaagaacactgcactataaaaaatgctaatgtgaacaacaaaattttcagatgactcaatgggtggccacacatttctaacatataactcagcttgacactttcctaagtcatttctttgcctattattaggacccttatgacaaaaacgtccctcctctgagtgtagctgggttgcatttgtaaaccaatctatctgtcctatccttaccctatccctgccacgctttcaaaattctcatcttcccttgcaagaggacagtactctgcatcattcccattactcttcttggttcagttagtggataatcgtctttcacaggcaagggaaagttcacagtaacattaatgtgatgattttgccccctctatactttagtaaagttgtatttatccttcttatgtgcatggcatgctcaaaattaaccagaatgactctaaaaggcttggtcaaagcagctgaaataccacaaataattctgcttgtgtgaagtgaaacactgctgtcaacctgccgggcatggtggctcacgcctgtaatcccagcactttggaaggccgaggcgggcggatcatgatgtcaggagatcgagaccatcctggctaacacagtgaaaccccgtctctactaaaaatacaaaaaattagccgggcgtggcggcaggcgcctgtagtcccagctactcgggaggctgaggcaggagaatggcatgaacccaggaggcggagctcgcagtgagccgagattgggccactgcactccagccagggtgacacagtgagactccatctcaaaaaataaataaataaataaaaattaattacatcatatatcttcataatgttccaataaaagcatatcaaagctaccagttttatacttatgaaattctacctggaatttcagaatctcaccatttctttttcttaaatggttaaatgagatggaaaaagatatataagcaataaaataagggccaggcacagtgactcatgcctgtaatttctacactttgggaggctgaggcgggaggaccacttgagtccaggagattgaggccagcccagacaacacagcaagaccccatctctacaaaattaaattaaaaaattggccaggtgtggtggcacgtgcctatagtcctagctacatgggaggctgaggtgggaggaatccttgagcccagaagcttgaggctgcagtgaactatgattgtgccactgccctccagcatgggtgacagagggagatcttgtctcaaaaaaaaaagaaaagaaaaaagattacgcaaattatacaacatttaaaatgattcgaggtaatgacatagcaaatcaatgaatacaacaggaaaatccagacaggctatcatcaataggttaaaaatgagagatgggctgggcacagtggctcacgcctgtaatcctagcactttgggaggccgaggcaggcagatcatgaggtcaggagtttgagaccagtctgaccaacataatgaaaccctgtctccactagaaatacaaatattagccgggtgtggtggcgcacacctgtaatcccagctactcaggagactgaggcaagagaatctcttgaatccgggaggcggaggttgcagtgagccaagatcgcaccactgcactccagcctaggcgacagagcaagactccatctcaaaaataaataaataaatatgagagatggtattctgttgagggcaagagcatgtgggagaggtaggatctatgattttaaaatgataggctatgaggtacctgttaaaatatagttaaaagacccaaaaataagagtatggaaacaactgcaggctggggaagaaaacaaaacaaaacaaaatccctggctcactgttcaaggaccaagctataacaatatttaaaaagccaatcaagagaactccagaccaagagatcctccaaggtatcctcagctctctttgccagcagaggtgaggggatggggatgaggaggcagcatgcgcggggccatcaagctaacctgaatgaatcattcaataaacatttgttatttgccttttatgaaccaggaactataccaggtactggagagatgcagtctttgtctccaaaagcttagcctcttgaggacacacacatctaaataactgtaattcactaaagaggatgcagcagtgccataagagcacacacagggccaagaacaatcctcagagctccacgtcgacagcatcagtgccgacacagtcccctcccttgacaaaatgagccacgtattcacaggcacttctgctgcatttgtccagtgagctcatcatgcggccaaaagtgaaaatgtggactctttaggagtcagatgcaacagtatagggtcagaggagatgtcactaacagctttccaaaatcatgagccaccagtgtcactctaacagttatctcccttccacacacacaaaccccattgtgtttctcagtaacaacaaaaaaatagagttcaacttgggtggagatcaaatctgaactcagagttccttcctcagttccttattggcaaaatatgtataaacaatctctttaaaatgttactacctgagaatgtttctgaacgtcatggcagcattcccccaaaggtgtcatcgccttgacaaaggagaaatgaaccacaaaaaaacttacactctagctttctattaaaatacataatacaaatactattcaagtggttctactactagaaatgaactacttgttttcccccccgcccccccgagatggagtcttgctccatcaccatccgggattgcagtagctcaatctcagctcactgcaacctccaccttccgagttcaagcaattctcctgcctcagcctcctgagtagctgggattacaggtgcctgccaccacacccagctaatttttgtatttttagtagagacagggtttcaccatgttggccaggctggtctcaaactcctgaccttgtgatccacctgcctcggcctcccaaagtgctgggattacaggcgtgagccaccacacccggcctgttttgtttctaaatacaaaaaaaaaaaaaaaattgatgtttaatttccaagtctaatatacaaggttcagtatgtttaatacagagtttatagattgttttttcaattgctccactacttcctactttataaaataataaattagaccagtgggtagaagaatttaacccttcggagtaggcgtagaaaatttaatactctgggttaaaaatactggggactcaaaaaatcctaagtacgtaatgggaactaaactttaaaggatatatatattttttttttttttttttttttttttttttttttttgtagagacagggccttgctatgttgcccaggcttgccttgaactcctggcctcaagtgatcttccccactcagcctcccaaagtgttgggattacaggcatgaaccaccattcaccatgcctggtagattttttttttttttttttttgagacagaatctcaatctatcatccaggctggagtgcaatggtgcgatcttggcttcgcctcctgggttcaaacaactctcctgcctcagcctcctgagtagctggaattacaggcatgtgccacaatgcctggctaatttttgtatttttagtagagatggggtttcaccatgttggccagggtggtctcgaactcctgacctcaggtgatccacccgcctcagcttcccaaagtggtgggattacaggcatgagccaccgtgtctggccgcctggtagatatatatttaaattgggctaaactctcagattaaaagaatttaactttaaaatataacatgaccagatacagatatctggttaatcatatacgctaaattcctgatatatcaatatttgaccagtttgcaaagaatcagacaacagtagttccctcaccattgaaaacagttcagtctgctttgaatgactcagaaagcatctcagatttcttaaataactcttggtcatcatttaagaagatcaatgagcaatgtagagtgactatgctcaagtgtcttttagcagcatactccaataaatagactgcctgagaaactaccttttgtcttagtactgggctgcctggattctgctgccaactctgtatataaagtactttattgagatattttcagtaaatcttagttattatttaaatctttgttttcagtctcttccaaccactgtaaaacactggaagtacaaataagtaaaaggagtaaggtagtagaacttaatgcataaagcagtaattgaacgctttatatatcagttccctcatctgcaaaatggggataataatatctaagacatattatcttctgatattaaaaaccaaccacaggctgggcgcagtagcttgtgcctgtcatcccagtactttgggaggccaaggtgggaggactgcttcagcccaggagctcaaggccagcctcggcaacatggcaagaccccatctctacaaaaaatacaaaaattagctgggagtggtggcgcatgcctgtggtcccagttactcgggaggctgaggtgggaggatcacttgagcctggaaggtcaaagcctgcagtgaactgtaatcatgccactgcacagcagcttgagcgacacagtgagaccctgtctcaaaaaaaaaaaaaaaaaaaaaaaaatcaacaaaaaaccaacctcatagaattgttatcagcacctacttcacagggctactacaaagtatcttcaacagtgcttgccaaatggtaaaagttgccaaaatgttagttattactatgtgcattattgttgtcactatagcatcaatttgatacagtaaataattatattgtttagaaaatatgtcaacaagttgagggagcaaaagagcaaaaatattttcttttagggctgacctcacaaataaatgggtaactaattcactttggacataatgtctaaagcaaggaaaataacggtcacatactctgtgctgatcagatgagatctgcaaggatgtcaacaaatcagagcacccaaaaaaatctatgagataaagtatctgagaaccaagcaacagaaggaattgttggaattgccagggatacttctgctgaaaatagactgctaaggagcagacagggcagtgcaagggcacagatcctggtaactcaacaatattgagaggttattaaataggaaagggagtcgaattttcttgcgttttaccagatagaaaaattcgggtcaatgagtcaaagctagaggaaacagacttcagctcacttataaggaaaaactgtcacatcagacactacagatgttggaaatgcctacggacatgggtgggatggtgtgagagtctggtcttttccaaatcttaagtctctgaactaagagtcgtttgttgttgaagactagaattcaaggttaaactaaagaatgctttcaaagaaaatgtcaaataactggtagcacaattattttagaaaactgcagttaatattaatattcgcttcttgtcaactaccttacaagggcccttaccaatattaaaacaacattttacaactttaaaatgcagctgtaagttcctcccttgagccctagaagttattttattaaagataacattatacagatcaaacccgcaagtattttaaagtactaataacagaagtacagatcccaaccaaacttctttaaggtttcctgggaaaaattttccagagttccaccaagaacacatgaggaacacgtttccatttgctgaggtcctggcaatccacatggagcctagtgcctggcacaaagaaaagacagaagagtcctctctttcctccctccctctccccatctctccttgctggacagtgagaacaacaacggctaattccaacacagctggagaaagaagggggaagagatgagaagacaggaggaaggaagatggaagtacatgggatgcatttaaaatggtaatagtctaattatacaaatgagcactgcttcacaaaaacacgcttcttttgttatgagacgataagcaaactaggtatctttgccatttgtttaaaactggattataaaactttagagaaaataaaattaaatagttctaaactgaaataactttagaattgaagtgaaaacctcttcttcaggaatatattaactaggatttcagaaacaagagccgctacaggaaaaagaaaaaaggaatagaagggattagcagtgaggaaataagacaggtatagatgaagcataattatatctgtaaagagatcattctattattttctactaacttaattttatgtgtaacaaaaacttaatacaatccaaaatgttaccttctccctaaattcaaagaagaagttctaagttctctaacttcatagactgttgctttctaactgtaacaaagattccataatgtaattttttatataacaaatccattactatattggaaagttaattataatactgggtaacttacagtcatatttctacaagaaaatgaaatggaactagcaggaaacttactggccagcattcatttactttagcttttttttttttcacacttctcagacatgtgtgatatgatctttacagggtatctttgcaaactgcctctgcacatacttgacctatccttcctgaaatgaatttacttttcttgtcttcatggtgaacacctatttatccttaaaagactcagcttgcccactgcctccttgaagtcttcctatacccaaatatctcatatactaactcatacactaaatttccaaacttttctcacaaacttttcttgtcactacagaattggtacaagagcaatcttctcaggattcatgtcattcagacccacagttccatttattatcatctttttttttttttttttttttttgagatggagttttgctctcattgcccaggctggagtgcagtggcaccatcttgggtcactgcaacctctacctcctgagttcaagcaattctcctgcctcagcctcccgggtagctgggattacaggcacctgccaccatgcctggctaattttttttttgtatttttagtggagacggggtttcaccttcttggccaggctggtcttgaactcaggtgattgacctgccttggcctcccaaagtgctgggattacaggcataagccactgcacccagccccttcattccatttagattctatggtaggcttgttagatcaaagggcccttgattcttcatccaaaaaaatgggtgtaaaatgtgaattgagggtttccagaaaagcccttgactcctcagtagaacagtactgatagcaaagcttcttatcattacaacctcaaagttacaaactacagcacaatccctaaaggacaagtggcagaccatgctaacaaaaggcagcagacttcctgaactacacttcaagttaagaggcaaaatatgggtaaaagacgtctaagtcatattaaagggttccttgtaattacacctaataacacaaatcgatatgttggaaacctcaatcttgttatactagaatgatttgactcaattgattagttaagtattccttgagtaaaatctagacagtaagacactgtttctaagcaaatgaaaccaaaagttcaattgtgattcaccatgtgtcttactcttttttaaaagagtgatgtttgctcatcatttcatgggatcgtttagcatgaaatgtggctccgatttgcctacactgtgcatgtttagggtgcactcaaatcacggcaaccagaagttcactgcaatgactttttccctcaagtcaatggcctagaattaaacactatggttaatactgagagctacacagcaggagagataacgactgtgacagtcacagtcacctgcaactgtcagccactgatcaacacagagaaacagacatgtagacaggttcatggccctccaggaggcctgaatttaccatgctgttttcatcgtcaccatgttataaccaactaaactggccaggtttgaggtccttggaagaggtcatgctgtgccttttccttttccctacacaagagaactgggacaatgttgaagataaaatgcctaagattagacatcgtgtccctaactgcagggctccatcactttcaattcagtcatgttactattcagattcaaaatgctgaacttagaaatgtgccatgtagtaaactgttctcattttcatctagctaatcaatattggagagcattccatctgtctaataaaaagttaaaagcgtagctcacaatatgcccttttccacaagtgttgcatattttcttgggtaccacatgctacatcactatttcaggaataagatacctgaatcaaccctctaatctttatctgaactgtccaccctttaaaaaacacacacatatagataatggtgttgtaaaaagagtaattgtaagaagagtcctcatcttctagagttatacacacatgtgaaaatagttgtgagcgaaataatgtctggggtttgctttgtaataatccagagagaaagggagcataccgatagcccactggccaggagatggtaacagtggaagccaggtcacaggtgtgtgggggttactacacaattatctctacttcagaatatttgatattttctgtaataaagagtaagaaaaaaagggacacaacactaagtcactgacctgaatccacttttaatcttccatggaataaagaaaaatactttatttttattttatttatttatttttgagatgaaatcttgctctgtcgcccaggctggagtgcagtggcgcaatctcagctcagtgcaaccttcgcctcctgggttcaaaagcgattctcctgcctcagcctcctgagtagctgggattacagacacccaccatcatgcccagctaatttttgtattttttgtagagaccatgttggccaggctggtcttgaactcctaacctcaggtgatctgcctgcctcagcctcccacagtgttgggattacaggtgtgagccaccacgcccggccaagaagcagactttaaagtagaataatatggtgttacagaagtcactaaacttttaaattaaaactaagacatgctacagattcacatgaaagcctaactttgaaaagaattcataggatcaatcaacatatccacaatgaatgcactttaaaaagtggaccatcaagatggatatccaggtcagcatttccatcaagttactcatatatctgataggagctcttctgcacgttcttgttattcccacagcttagccgtagccttttcacttcactgcccctctaaccactttgaaaacatgctggatgcatgtacctatgttgaacaaacagagccgttttttacactgtatataataggaggtttactcaatttttacagcatgctgtgcattaatattttaggaatgaatttacaaccaatatagtaatcctcccaaaagagctctcccacagtgtctaccactaatacacatccaaaataaaaactctaaagagactgccttgggtattattttggtaagcaatattaagtgctaaagtttaaaaataataagtatataaaagcctatcttggtagaacacatctgattaataaactataaattttcccaaaatcaaatgaaacaaattagaacaaaaaataacatttctcttgtagctgaaaatccagaaaaataaactgaaaataaagaactttccttttaaattacttccttaattcattttaatttaaaaataatggaaatttgtttcttttttgccctcctactctggagtggggacagttactaataatcagaaacttttgttcctgttgttggtttgtttttcttttaggtccttatcaaaatgaatccttatctaaacatcaagatgtaaagactatccattctgagaatgttttgtttctcaatatgaagaaaagaaactaaacatttccatagtaacagtgagtgttactaaatgatataacttcctaatacctacataggaagaagagcagatgacaattgaagggggaaactggaagctgaaggagcttgtaacaatcatccttatccatgtcaaattccctgtaggcatatattcccaaatggagcgagattctagtctactctccctagatgctaggttaaaaaggaaaagacattatcaaaagattatcctcgacacataatgcttaaagaagggtgtggccatgttttacataggattcaaacccaaacagggagttccttcacccatttcttttataatatctaacctcttttaatcagtcctttacaattcatttgtccttaattcaccaactgtaactgctaaacatttttgaaatatatatctggtttttaaaattggagaagggaaaagtagtgtattgaaaatctgcatttactaggccaggcacggtggctcacgcctgtaatcccagcactttgggaggctgaggcaggcggatcatctgaggtcaggagttcaagaccagcctggccaacatggtgaaatcccgtttctactaaaaatacaaaaaaattagcccggcatggtggcgcacgcctgtaatcccagctactcaggaggctgaggtgggaattgcttgaacccgggagatggaggttgcagtgagctaaaatcacactactgcactccaggctcagcgacagagcaagactccatctcaaaaaaaaaaaaagtctgcatttactaaaatgtaacaccctctgttccccaccccaacttctcaggaggaaatcatttccccaatgtctgccatcctttccccaaaaggctgccatggttgttaagagcagcaaaaggtaacttgttcagacaaactaagacccgtgtctttatatgctgaaaatacacattacaaatagataatactttaaaatattatttgacccatcaaggatgaccatcataaaattattttattgagttagttagttctactcacttactatgtgccagtataaatctattatatgcatatctcaaataagccctaaaaggtaagtactattattattattattccccttattagatgaaaaagtttaaaacttggaacttagatatagccacatggctaggaaatggtggaatccatgcctgccttactttgaaactcaaactcttgaccccaacactacacagcttctctaatcaaagcctttctaaaaggaaagaaggtcttattctaattagttgtagtcaataccagtaatctaagataatcaaatcaaagtccctctgccctcttagaaatactaagctccacttattgtaagtataaaatgtatgctgtatatgtaaatgtgtgtgaattactgtctacatacaactgcaaggcatttcagcacttttgaggaatacctcatcagtattcctcaaaactgtcaaggtcatgaaaaacacagaaaagtaagccaggtgcagtggctcacacctgtaatcccagcactttggtaggcctaagcaggtggatcatgaggtcaggagttggacactagccttgccaacatagtgaaaccccatctctactaaaaacacaaaaaattagccgggtatggtggcatgtgcctgtagtcaaagctactcagtaggctgagatgggagaattgcttgaacccaggaggcataggttgcagtgagccaagaccgtcccattacactccagcctgggcgacagagcgagactccatctcaaaaaaaaaaaaaaaaaaagagagaaagaaaaacagaaaagtgaaaaactgtcacacactagaggagacaaaagagacatgacaatcaaatgcaatgtggtatcttgaattagatcttgaaacagaaaaaaggcaatggaaaaactagtgaaatccaaataaaggccaggcgcagtggctcacgcctatagtcccagcactttgaaaggtcaaggcaggtggatcacttgaggtcaggagttcaaaaccagcctggccaacatagtgaaaccccatctctactaaaaatacaaaaattagccaggcatgtgcacatgcctttaatctcagctactcaggagactgaggtaggagaattgcttgaacccaggaggtggaggttgtagtgacccaagatcgtgccactgcactccagcctggatgacacagcaaggctctgtctcaaacaaaaacaaaaaaataaattccacaggttagttcagagttaagtactaatgatggtttcttatacttgagagatatattgtggtaatacatctgctaaactgagtgagggggttgggaaactatgtttgagaactctctgtactatctttgcaacttctctgtaattataaaagtattccaaaataaagaaaaagttaataatttaaaagttgatttaaaatatcaacatctctatacagaaagaaatgtgctgcactttgatcctagttaggcattttattctgaacaaagcagagcgtaggcaattgactcactgctttcaacccataaaaccactttgatataaatacatacaaaagcacaataaaaatgataaattataaatataaaagcccaatggtatttaatatctcctcatctcctcacatttgtaaacatatgaataattttaaaaccagacaagtatacttctaatatcacattaattctacatgtgaatctgaaggacaagggtcctcttccctacttttccctgcaggagtgctgccttacacatttagaacctccatttgtctattaggttgagagaattttctaagccctatcaaccgaaactctctacccattgcttcttctctaaaaggaagagaaaccaactctcctaaatgatatctcatcatcaggcaatggtttttacctggtaattcaaatgtggccagtatttcaaaatgattttctagatactgttctcaaattttctcttaactgttttccaaagttattcccttactcattcacttgacaaataattacatcacacagcaatctgaatcacactgaacttggataacaagttaaattaccaattcaaaaatatgaaagcatattccattgtaatgctcctggcaccctagagagattttgtcatttcaaaaacaacacccaaaccaaggcactaaggactgcaatccaccccattattttacacttaattctctaaatgagatataaaaacattcttacacaggttacctgaaatatcagcatttatttgtcttatttataatgtgattctggtttacattaaacacaaaagcactagatattatatatatatattataaaatatatattatatataattatatattatattatatatatacatatatatatattttttttttaagtcagagtctcactctgtcaccaaggctgtagtgtaatggtgcaatctcggctcattgcaacctccaccttcccagttcgcaattttcgtgcctcagcctcccaagtatctgggactacaggtgcgtaccatcatgcctggctaatttttttgtatttttagtagagatggggtttcaccattttggccaggctggtctcaaactcctgaactcaagtgatctgcctgtctcagccttccaaagtgctgggattacaggagtgagccagtgtgcctggccaaaagtactatatattatttcatgggacatggtgatcttattaaatcagaggaatataaaatggccaaaataagataaaaaattaaatcactgaaaaggcagaataaaggtgaaggggagatggtataatattagactatttatatgaaaaaacagtcagagaaagaagggaaatttgtaacaattctctgggtattttgtggttttatagttgtcttagcctgggtcagtccctcaaatattcccaatctcatgttttttatctacaacattaagatagtaatgcctgtttacagaccaatttatttttaagtataaactgggcaagtaaaaaacaatttttaaaaagccacttttcaggcaaaattagtttttaaaaaactaaaaattgctaatcactggcagtatctggggaggaaaaaaaaagtgtgtgtaactaaccatattttagacccagctaaagcagaaaggaactttgtagccagctagaagctgagtggattcctggattaagtgcttgcttaccttggagacttgtcgcagccaccttaagtattctgtgaaagtatcaaagcaaatgtagtaagtctggctttggggtccagaggagctaaatgctaaacagtgttggtgctttttcacttcttctacctataaaagcaaacagagagaagcagaaacaagtcagacagcagaaccactgatgtatttcactaactatgcctctgatcaaggagcctgcatggatttgcatgtttccctatatatgttactcattaatgagaactaagttcctgcatatgatcacccaatttgaattacaaagaaaccaaaaaagggggagttttatctttactatatttccccaccacagtgaaattctcctctttctgtttaaaattagtccagactccctttcttattcttctaacctcacaatagggtgctggggttcttacttcctcttagaatttttacttaagattttacttaggaatttttacttaagaagtcttcaagcatattaaataagtattgaaaacattactgttaaactgaaattaacctgtaataaaaccctaccatgagaactttcaagtcctaatgatgcagtgaaatacagtcaaatcaaatttccactccttgtaagttcttcacaaggggaaaaatacacaccaaaagtaacattatacaaacttctatgtttggaaacttaataacaaacttctaaacaactcacaggtgcaaggagaaattacaaccaaaatcttaaaacgcttagaactaaataattctagaaaaactacatatcaaaatctgtatgttgcaataaaagaagatatacaaagggaaatttatatatatatatatttttttcaattgaactcgtgtatcttttgatagtcatattggaaaagaaggtagaacattaatttgctcggcatgcaccttaagaacttggaaggaagcctgggcgtggtggctcacgcctgtaatcccaccactttgggaggccgaggcaggtggatcacctgaggtcaggagttcgagaccagcctggtcaacatggtaaaacccctctctactaaaaatacaaaaaaaaccttacagctaggagcggtggtgggtgcctgtagtcccagctactggggaggctgaggtgggaggatcgcttaaacccaggaggcagaggttgcagtgagctgagatccagcctgggtgacagagcaagactctgtctccaaaaaaaaaaaaaacttggaaggaaaaaaataaaatcaaacctccaaattgaataaatccaaaattgaaagaaggctatgataaaaactagcaattggtgaaatgaaaaccaaatatgtaagagaaaacattaacaaagcaaaatactgattcttcaagaaaactagtacaattgataaatactctggcaagaaaaatggatacatcctctggcaagaaaaagagagcagagacacttataaataatattaacaattaacaataaaaagggagacacagctacagattcgccagagattaagaagagaatattatgaacaattttgtgacaaattcttagaaaaaatatgttttaccaatactactaaataaagaaaaaccaaaagcctaaatagtcctatcagccaggtgcaggctcacacttgtaatcccagcacttcgggagacctagagggacagatcgcttgagcccaggagttggagatcaacctgtgcaacatggcaaaaccttatctctacaaaaaacagaaaaacaaaagttagctgggtgtggcagcgcacaccttgtagtcctatagctactcagaagtctaaagtggggaaatcgcccaagcctggggaggtcaaggctatagtgtggagtaactataccactgcactccaacctgtacaatggagtaaaatccagtgttaacaaaacaaaacaaaaattgaatagtcctataactttgtttttgagacggaatttcactccttgcccaggctggagtgcagtggtgcaatcttagctcactgcaaactccgccttccgattgcaagcgattctcctatctcaacctcttgagtagatgggattacagccttggcctcccaaagtgctgggattataggcatgagccacgcctggcccctatatagccatttaaaatatagaagttttttttttttttaatgtctcaaaaaaaatcaggcccatatagctttacaggtaacttttaccaaagtttcaaaaaatagatcaatccaaactcatgcaaactcatccagcaaacaaaaaaatgaaggaaaacaccccaacccattctatgaggatagtataaccaagacccacatgagaacagtaacagaaaggaaacttacaggtaaccatggtcacaaagatttatcttgaacaaaatgttgcatcaaaatccagtaatttatttttatttatttatttatttatttatttatttatttatttatttatttatttatttttagatggagtctcgctctgttgcccaggctgcagtgcagtggcacgatctcagctcactgcaacctctgcctcccaggttcaagcgattctcctgcctcagcctcccaagtaactgggattacaggcgcctgccactgcgccaccaatttttgtatttttagtaaagacagggtttcaccatcttggccagtctggtcttgaactcctgacctcgtgatcaacccgcctcagcctctcaagtgctgggattacagacatcagccaccattcccagccttttaattaattaatttatttatttattttagaaaacccagtaatttaaaaatatatatatgtatcaagaacaaggccgggcacggtggctcacccctataatcccaatactttggaaggctgaggcaggcgaatcatttgaggtcaggagtttgagaccagcctggccaacatggtgaaaccccacttctactaaaaatacaaaaattagtcgggcgtggtggtgcatgcctgtaatcccaggtactcaggaggctgaggcaggagaatcgcttgaacccgggaggtggaggatgcagtgagctgatattgtgccagtgtgctccagcctgggcaacacagcaagactccgcctcaaaaaaaaaaaaaaaaaaaaaagaaccagttgaatttacctcagataaagaaagacagtttaacgtaattagaactataaaaccattaatcacattaacggattaaagacacccatactattaaccccacagttgcagaaaaagctgttagtaacttcattcaggctgaaatgaagaataaaaattctcagcaaactcagaaaataaaaactcacttaaactgaccaagggtatttatcaaacatctaaagcaaacttcaatgttaatgatgagatatcattctcaagatcattgataaggagccaggtgcggtggctcacacctgtaatcccagcactttaggaggccgaggcaggggggtcacctgaggtcagaagaccagcctggtcaacatgatgaaacccagtctctactaaaaatacaaaaattagctgtgtgtggtggcatgcgcctgtagtcccagctactcgggaggctgaggcaggagaatggcttgaacccgggagacagaggttgcagtgaaccaagaatgcaccactgcactccagcctgcgtgacaagagacagactctgtctcaaaaaaaaaaaggaaaaaaaaaaggatcattgataagtatctactgtttctattcaacactgtactagatcttcctgcccgtaacagtaagacaaagaaaaggaagaaacctgtcatcatttgaatattatatgattaactatacagtaaacaaaaaaacctacaggcatcatattagaataaaccagaacatttagcaagacgataaatcaatactcaagatcaatactcaaaaaccaactgtgtttctataaaccaaacagaaaatacgattttttaaaaaatgctgtgtaaacaaattgacagatatcaagcaaaaggtttcttagggatggagaggagtgggagagggtgggaggaaaggaaaataaaagggtgggaggaaaggagaacaaagggacacgaggaaacttctgggaataatgaacatggtcactatcctggttgccgtgatggtttaatgggggtatacagctatcaaattgtgttaactggagtgtacagttataaaactgaaatgtgcagtttattgttgtcaattacacgtcagtaaagtgttggtgaagatgtggagaaacaacacttgtacactgatgtgaatgcaaaatggtacatcgaccctgaaaaacaacttggtatcatcttgcgaaagtagatgtgtgtatgtcccagagcccagtaaccgagctccaaagtgtatacccaacagtagtatttctcaaggagatcattataggaattgtggattgaatagttcttcattgtcccctatgcagaactctctaatactttgcacaatattttaaactctcgcctctgcctttaaatgccaagagtgtcccctgcagcaaagataatgttattcaccaatcactctatctactccacatttctcagaccccttgcaattaaggtggagcgatgtgactagttctggccaatgagccacagagagaagtggcatgtgtcacttctgcatccaaacatacaaggcccatgaatgatgctccaattacctcttcccttgccaaaacaacaaagggaagtataaaagagccaagacttcatcaggctgggtccctgaacaactgtgtgacaaaagaaacgcccaccccccaaccccactgacccacaacagacaatgtgagaaataactgttatgacaagtcactaagattggggggaaaagaggggtgttaccagggcattacttatgcttatattaactgataatgttcactgttcaatcatctgaccatcaaaacattcctacatataaccaaatgtcccttcagcatagtaactccactcgcaaactactgtcttagaaaaggtacttgcataccaggaggcatatcaacatgagactatagcagcagcactgttgttattataacaacaacaaactgaaagcaacccaaatgtccatcagcaggaaaattacttaaggaattatgaaaattgtggaatgtttacagtagacattatagagaaatgaaaaccacataagtaacatgtaatcttattatgaaacattgtattaggtgaataaattcaattacagaagaccacagcaatttatcacttttatacacatcaaaaacaagcaaaatatagatacacggtaaaacttatttcaaaaaaggaaaaaatgaggaatatacattctaggacagtgaatccttctagggctaggggaggcaatgagatatatgtaaagagaacacaggtagaagaaactctggtattgatatccccacagttcctaaattcagtagtggctgacaattcttcaatttattatacttcataatttaacaaatattaattaaaatacagtattatctggccaggcgtggtggctcacgcctgtaatcccagcactatgggaggccgaagcaggcggatcacttgagatcaggagttcaagaccagcctggccaacacggtgaaaccctgtctctactaaaagtacaaaaattggccgggcatggtggtgtgcacctgcagtcccagctactcaggaggctgaggcaggagaatcgcttgaacccgggaggcagagagtgcagtgacccaagatcgcaccactgcactccagcctggatgacaaagcaagactgtctttttaaaaaaataataataatacattatttaaaaatctatgttaaattctataggacaagttaaatacaacattaaaactgcataatataaatgtatctattaaatactctttcaataactaaattttgagagttttatttaacagcaaagccatatatgtaaagtaatgaccatgctcacgtggtatgaaaccacagcaattctaactaggttatgaccaatctatctcacaccttatttctaaatctatagctcttctatatctaaattaaaaagaaaaaataaaactcctttcattcatactctcagttttttctttaacaatagaacaggataaaaaaaaacaacaacagacaaaaattaatgaaagctcaaattgcaagaaatcaattatttttccctaactcagtcaacagatattaaagactcaatttttcaatgtagtcaattattttttaaaggcatagtataaaacaggttttacaagttttgcttgtgaaaagaggaagctattaactttcaattcactcagtggtagaagaccatccagtaacagacctgggaaacaggacaagactctagtactgaatgaaaatgctaattataaccggatctgctgaccttatctgaacattccatgtgctttcctgcctctgcctctataagcataataatctttctgaccatctccttcacatgtcaaaagacttttcatccttcaaattctatcataattgctacctttcattacaaaattccctcttacccgaaaaaatgtaatctctccttccattaatcccccacagtaccttcctgcatctttcttacaacagatatcattgtgcctacttcatcttctgatacaaaatcataagctcttcaaaggcaggcagggttatttagctatgttagtatttctggggtgccaagcacagtgccttccccaaagaggatactgaatagttatattagatttgcctatgcaaacacccagcatcacaaagagagagactgttgacctaacaaagtatcaaacattaaatatgcatttttaataacctatagtggtaatacagatgagtattttttcagtaatccatccatccacagggcaaaatcttagtatatcagtcactaactcttcaatgctccgacaaaagttaagcagcattggtttcaaaatgaacgactaaaatcaatctaaacgcatcttgcacagcctgaccaaaacctatttttgaaaatgatcaagtattagccttcttgaaactagaatagagaggaaaaaactaacataggctatttattcataaggaaagactacaagaatgtgcttgctacacagcagtgagcaacaaaaccatttattaccatacacatgtggtcttacttccttcacttacaacccttgaaacagatcagacatttagacaaccaattaacaaatggtttacttaggccaggcacagtggctcatgcctgtaatctcagcactctgggaggccaaagtgggtgaatcacgaggtcaggagatcaagaccatcctggctaacatggtgaaaccctgtctctactaaaaatacaaaaaattagctggatatggtgtcatgcgcctgtagtcccagctacttgggaggctgaggcaggagaatcacttgaacccgggaggcagaggttgcagtgagctgggattgcaccaccacactccagcctgggaaacagagcaagactccatctcaaaaaaaaaaaaagaaaaagaaaaagaaaatatttgctcaatgtgcccccaatgacccattttctcatccaaatcctaatttccatttattaacatatcacttaaaaatcaagaaatactgacctataagtatggtgatgctacccttaccaatgcttgggactttataaataactctgacaaagaaaataatgtaacatttccccaagtaatctggttctattttataaataatagcaataaaatagttaacatacccaaagcaaagaaatcagtaatgtcaaaaatatatccgttgcatcacattttctccgaaatgagaaacatttaagattcaaaatttataactaggcacttaataaactaaaaatgctaaccccactgatcactaaacacagataggggaaaatgtggtcaaagacttaagcactatagactcaaaccctccgcatgtgtcaatgtttctaaattcacgaaattaaggatgagtatactctactagaaaatgtatgcttaagatatcaactcataagtaacgaatttatcatctaaactctgacatatgacaataaaattctacctattttctgtccagtaggtaaaatgcacataactaatgaaacaataatcatcaaggcctcacatgagccaatggcactgttttttccccacagctccaccaaccgacaacacccacaacaggaactgaataagacctcagatgagtaaaaaatcatctaccccatatcacagaaatggctcaaagtaaggtccttactgatggtgggaaacctgttagtattttgtttgttttaaacttacttttcggcctggcatggtggctcacacctgtaatcccagcactttgggaggccgaggtgggcagatcacttgaggtcaggagttcaagaccagcctggccaacatggtgaaaccccatctctactaaaaatacaaaaattagccaggtgtggtggtgcacgcctgtaatcctggctgaggcaggagaatcgcttgaactcaggaggcagaggttgcagtgagttgagaccacgccactacacttgagcctgggtgacagagtgagactctgactcaataaacaaacaaacaaacaaacttacttttccaccaattagtggcagaacatgcatctttccggtcaagctgtctttcacagatgatactatcaggcaggtcccacataggatgacttggcgtcttgtccatcggttcactggcaactgcatcttgcctttacggacattatacattcctgagagctgaatccgttcagagctacccgtgctgtgaggttttcctgaaataaacagaagcaaacatgttattcttttaaaatggacccttttcctactcatctacatagcagatatatgaattggacaacaagggaataattcaagggaaaattataaattcaatctaatttataattgagatgacaactgtcataatggaattatggtaagaactacatctccacatgtacacgtaacaataagtgaagagccttttccataaaatcataggaaaacaccattttaactctttgttttaactagaggtttcttttctttttttttgagatggagtttcgctctgtcacccaggctggagtgcagtggcgcaatctcgactaattgcaacctctgcctcccaggttcaagcaattctcctgcctcagcctcccatgtagctgggactacaggtgccggccaccacacgactaaattttttgtatttttagtagagacggggtttcaccatgttggtcaggctggtctcaaattcccgacctcaggtgatccgcccgcctcagcctcccaaagtgctgggattacaggcgtgagccaccacgcctgggttggagttttattttcttgcctatctttcacaagttaattttacatttgaaacgacttcatgatgtttatgaatggttagatttaaatacactaagaagaaagtattatagcctgagataggaaaataacatccaacatcttacatttaataaaactaatcagtttaataaaattaactgcagagtttttcctcctacagatattcaatgtatatttactgtaaaggaaacattagaaaagaaatatttttcttaaaaaaacactattatttcctattagaaatactatcccagcaatccatgaagaatgggtcctacaatgcttatgactcatggtaaggagcacagagacagagaaataagcaatgaggctgaaaggcagaaagagaactgagaaaggtctgaagagtcttcacttcccaaatggaaacgaatttggcagaattagttaggcaagtcttatcaacttaatgggagaactactgtgattgacatgaacatagtgacagtcatataagcaaccagaaaagtatttccccatttctagatactgaacagataatttcagagtaccaaagcctctgcccagagataagttaataagagatatatgtactatagtaggaccccagtcaggaataacatatttatttagaagttggactagttgccaagggctagcaaaagaaataggttcaagataaattatattcttattaatattaaaaaccaacataaataccaagtggttttgatacatgtctaaaacctattagggaacaggaagaacaacagctctaaaaataaataacaagaaactccaaagagtatctgaacgttcccaatacatactttgggcacagatgttaggaaataagccacaggttcgaatttcacttcttctttctcccatatcaaaatgttttataaaataaatacttcacactacaaaattttgctgaggctgggccaggatgaagtataacagtgattcagctacttgaaccaggtgcccagcaaacagctacactgttagagctctcactggaaaggtaccatattgtttgtctaccacatgttagttttcccacaaatgagtaggaagcccagaagattatttaaaacatgtgagatgtgacaggccaagggctgccaatgatggatcagacacagtgattcacatgtcccattctgcacaagttcatttatatctagagaggaagatgccggggtttccagtctaagagctccttactatatgacagactctcttcctgtggggaagaagtaagagagaagaaaagacaaagaataataaaaatgaaaagcaagtgaaggactaaaaacaatggacaataggcaactgggtttccaaactccaatttccttgacataataaactaatgctaaaaagggatctgatctacacacacacacacacacacacacacacacacacacaaatgcaaagaagtaggcattttattcagtccatcagagagtggcttcaagaatacttgttaacctgtcacatttatgcagctctatgaagaaccagagactggaagaaaagggaacaggggtacataagggctggcccttcaattctccaactccatatacatcctacagaaagccccagagcaaatcaccagacagactggacaaaggccagaagggatctttaacagaagagtatggatacatcagtagatactggctctttattccctagtcagaaaaattcccaagagttctgaattgtcctggagcccaacagtcagatcagcctgtccttggaaaaccctaaagatcccagtatgaattaaatccctctggtcttgctctgaatgaacttcaatgtccctattgtctgtcctctccctgggtgtaccagatcagacacatccttaggacatggctgtgtactaagtgggccctggggaatatggagatgaatgaggtaatatatacctagacaatcacccaggtgcaccctcctttttaacagacttccttgttctacaacataaggaatatttttgctcttcctgccaattctcaaaattctcaactcagaggaattccagttgccctattctctaataaacactgacaataccaaagtaactcatgtctgccagtttaaagctgggtcagttgtaacttttactttagaaatgttactctaattccctacaggcttaaggcatttttacatgatccaggaggaaaaatagacgtaaaagcaaacatttcaagctgagacagaaacataacaacagagagtgatttgaaaacatattcatatactttctcttttacttacgcacttggcacatagtaggtaaggtgatctatactagtctatttaaaaaccaggcatgggaccacttgtagaaaattacagcacaatgctaaagaatcaaactagagcctctggattattttattttatttatttattttttgagacagggtctcactctgtcacccaggctggagtgcagtggcatgatctcggctcactgatacctccgcctcccaggttcaattgattcttctgcctcagcctcccaagtacctcggactacagacgtgtgccaccatgcccggctaatttttgtatttttaatagagacaggtttccccatattggccaggctggtctcaaactcctgacctcgtgatccacccacctcggcctcccaaagtgctgggattacaggcatgaaccaccgcgcccggatggcctctggatcttgattacatactcaaggctcctctcccacaccaaaatgacagttcttatttcacatagtaaaattgtttttttaaagagggggcaaaaaagagcatctaatgtccgttataagccactatgctagatgctagaggtatcaagaaaatgttctctgcgccaaattgcttaaagcaaaatctataaaaatgtagtccaaaaaccatataaagcaaaacctctaaaaatgtagtccaaggaccacgtatattagtatcacttagatttctgtctactaccgcagccctagatttgaaacattggtagccaaggcctgagacctgcacttccgcaaccacaaatagatgcttatattttgtgaccataaatctaaaataataaaataagtcattccccaaggtcagcttattttctaacaaatgtattcttcacattcatgaattcaggattttaattgtcatctccgtaagtaagctagttcaatcttttcatgtcatataaagctaccttaaaaatatgatgaaagcaatggacctccagaaaaaaaaaaacaaataaataaatatgcacagacatcagatttgtcagataactgtagtagatttatttgaccataaccatgagaataaaggatggtgaaatcactcaataacaagagcctattcccatttctttaaatcacattccaaacatgaagaagtggtggtttaaaattaatttctcctatagccgaatttattcttacaaaattatttctactttaattggctcgtcactttgccttttatctttttcatctcttctttcacatagtttacctatctcagggggcctagcctacctagcaaactatttagacagataatatttatcttgatagacattttttccaataaaaaaagctgagtattatagtgataggtctactgtaattgctataattaaaaatgtatctgggccaggtgcagtggcttatgcctgtaatctcagcactttaaaaggccaaggtgggaagactgcttgagctcaggagttcaagaccagcctgagcaacatagtgaaaccccgtctccataaaaaaattagctgggagtggtggcaggcacctgtagtcccagctaatcaggaagttgaggtgagaagtctgcttgagcccaggaagtcaaggctgcagtgcactatgattgtgccactgcactccagagcctgggagatggaataagaccttgtctttaaaatatatatattatataaatatattatatataataaatataatatgtaataaaatataaaataaatataatatatatttatataatatataatttggttgatatatttatatatatacatacattggtttttaaagtatttacaattttacatcagaaagccaaaactaacatcttaaccaaaaagtaaaacattatttgagaaagtacatattgggctggacacagtggctcatgcctgtaatcctagcactttgggaggctgaagtgggtggattacttgaggtcaggagctcgagaccagcctggccaagatggcgaaaccccgtctctactaaaaatacaaaaattattcaggcgtggtggcaggcgcccatagtcctagctactcgggagactgagggaggacaatcacttgaacccgggagactgagggaggacaatcacttgaacccgggaggcagaggttgcactgagctgagattgtgccactgcactccagcctaggtgacagagcaagagtctgtctcaaaaaaaaaaaagtatatatattggctcatttgaccactgttaaaaaaaatggggggtgggggtggtccattataagtaaaactttaagaaaactgaagcaatatactttgtgtgcctttgttggggttgttttacatcctgaatggtttaaacatttattttcacagtaagaccttgtcatttttttcagagccaaaaagtcactgttttgtgaagtatttttctagtgccatgaattgtttttgcaaaatgctttctatgatagaaacgtccaccttttaaaaatcttccacttttttttacagatttattaatgtataaaagacatacagtaaactacataaagtataaaataagatatgatgtatctacacacatgaaaccatcaccagaaaataagtatattgatcactgccgtttcctcatgtcccattgtgatttctccctccccctatatccctccagagttcctcccgcgctcaggcaactgctgatctggtttctgtcactttcatccatgttgttgcaagagttcattattttttgttgctgagtagtattacattgtatgaatataccacagtttaaccattgatctgctaatggacacttgaattctttacagtctttttttttttctattttgatggagaacactggtgtacaagtcttggtatagacaaatgttttgattcctctcgggtaaatacctaggattggaatggctggtttgtaccattttacatccccagcaccagtgcagagagttcccgatgctccacatccctgtcaacatttttttttttttttttgagacggagtttcgctcttgttgcccagctggagtgcaatgccatgatctcggctcactgcaacctccacctcccaggttcaagcaattctcctgcctcagcctcccaagtagttgggattacaggcaaccgccaccacgcctggctaatttttgtatttttagtagagatggggtttcaccatgttggccaggctggtctctaactgcccacctcagatggtccacctacctcggcctcccgaagtgctggaattacaggaataagccaccgcgcctggcccccagtcaacacttttagccattctagtgcatatgtagtggtatctccttatggttttaagttgcattcccctaatgactaatcatcttctcgcaagtttgtgatccgcatatcttctttgccaaagtaactattcaaatcctgtgttcaattttaattgggttaagtcctttacatattcttaacataaatcctctgtcagatatctatatatatctacatatatatgtagatatatatatttatgtagatatataatatatgtagatatatatagatatatatatttgagacagtcttgctgttgcccaggctggagtgcagtggcaccatcacagcttgctacagtctcaaccttctggggtcaaatgatcctccctcctcaagcctcctgaatagctgggactacaggtgcccgccaccatgcccggctagtttttttctattttttgtagagacagggtcgctatgttgcccaagctggtctcgaattcctgcactcaaacaatgcttccacctcggcccccacgtgttaggattataagcctgagtcgctgtgcccagacttctgtcaaatatatgacttgcaaatattttctcccagtctggcttacttttttattttcttgagagtattttcagaaagcaaaagtttccattttaataaagcctaattatttgattcgtcttttatagttagtggtttttgtgttgtacttaaaaaatctttgacaaactgaaggccagtaaaattttctcccatgttttcttctagaaattttatagttctaattcttacatttaagtctatgatcaatttcaagcaaaaatttctattaacaaaatcaagaaataaggctgagatttggtctgggtcttcttttatgtttgtttttatttttggcaaaaggctacatcaattgttctaagaccactggtgaaattcctactgaattgccttggtacctgcaataaaactgagttgccaatagttatataggtcaatttattgattagtccttccattactctatttgtctaccttcatactatcttgagtagtgaatctttaaaattatttgtgaaaccagttggtataaatcctgctctgtaaaaaagcacagttacaatctggatgccttttatttattttgcttatctcactgctacaaccttgaacagaagtggtgaaagcagacatcctttcctttttcctgatcttaagggggaggcattcaaatttgtgccatttaaaacactattggcggccaggcgcagtggctcacgcctgtaatcccagtactgtgggagtccgaggcgggcggatcatgaggttaggagatcgagaccatcctggctaacacggtgaaaccccgtctctactaaaactacaaaaaaaaaatagctgggcgtggtggcgggtgtctgcagtcccagctactcaggatgctgaggcaggagaatggcatgaacccgggaggcagagcttgcagtgagccaagatcatgccactgcactccagcctggaccacagagcgagactctgtctcaaaaaaaaaaaaacaaaaacaaaaaaaaaaaaaacactattttctacagatcctctatattgaactgaggaagtttccttttattcctaacttgccaagttatcttttttttctaaatcagaaagggatattggagttcctcaaatgctgtttctgccaccaactaagatgattatgatgaatttaattgataatattttgctttaagaaacagggtcctggtccatagcccacactgtgcagtaccacaatcatggctctgtgtaacatcaaactcctgggctcaggtgatctttctgcctcagcctcctgagtggctaggactacagctacataccagcatgctcggctaattaaaaaaaatttttttttgtagagatgggcatagtggcatgcgcctgtaatcccagctactcaagaggcttgagtaggaggtgggagaattgcttgaacatgggaggcagaagttgcagtgagccgaaacagcaccactgcactccagcccaggagacagagcaagactctgtctcaaaaaaaaaaaaagaacatacattcttattatccttttaatatctatagaatctgtaatgatgtcacctctttcattcctgatattggtaacttgagtcttctatcttttcttgatcagtttggttagagaactaccaattttattaagcttcttaaaggttttatattcactgatcttctttttcttttttcttttcttttttttttttttttttttttggataaagggtctcactctgtcacccaggctgcagtatactgatgcgatctcggctcactgcaacctctgcctcccaggctgaagtgattctcccagcccagcctcccaagtagctgggactacaggcatatgccattatgcccagctgacttttgtactttttgtagagacagggtttcgccatgttcctcaggctcactgattttctgttatttttgtttcatttatttttttcattgttattgcttattgcttcttttactaacatatattttttcttttttaaagacagagtttcaccatgttgcccaggctggtctcagactcttgcactcaagtgctctgcccacctcagcctcccagtgttgggattacaggcgtgagccaacgcactaggtccatcttttactaattttgagattctcttctttctaaacactgcttaactgcatcccataaattctggtatattgtgttttaacttttcatccgttcatagtactttctaatttcctttttatttcttctatcacacatagctattttggaagtatgtaatttaattgacacgtatttgaagattttccagctatctttcttttattggtctctggtttaatcccattgtggtcagagaatgttctttgtaggaattaatttttaaaatattttgttctcgccttgtcttacagtgctgaattaaaaacaaaataaacttactatacttgttttatagtgtaaaatacagtctatcttggttaatgtttgtattagttttcatactgctataaaaaactgcctgagactgggtaatttattaaggaaagggctttaattgactaacagttcagcatagcaggggaggactaaggaaactcacaatcatggtagaaggggaagcaaagcaccttcttcacaaggtggcaggaaggagaagtgctgagcgaagggggatgagccccttataaaaccatcaggtctcatgagaactcactcaccatcatgagaatggcatcggggaaactgcccccatgattcaattacctccatctgatctctcctttgacatgtgggtattatggggattacaattcaagatgaaatttgggtggggacacaaagcctaaccatatcaatgttccatatgtacttgaaaagaatgtgtattttgctattgcagagtgcattattctataaactgaggtccagttggctaagagtgctagtcaagtcttctatatttttaataattttgtctacacattttttcaaagattgagagaaagacattgaaatgttttgctataattgtggatctgtctatttctgcttgcagttctaccagcttttgatttatttatactgaagttctatttaggtgcataaacatttaggattgttatatcttcttgatgtatggattgctttatcattataaaatgaccttctttatcactgattatactgttttctctaaaatctactttgtcaatacaaatatagccactctatttttcttacaatcagtgttaccaacatttatattttttcatctttttactttgaacctatatggtctttatatttaaaatgggtttcttggccaggcacagaggttcacacctgtaatcccagcacttgggaggccaaggtgggtggatcacctgaggtcaggagttcgaaaaaagcctggcggccaacatggtgaaaccccttctctactaaaaatacagaaatttgctaggtgtggtggcaggcgcctgtaatcccagctactcgggaggctgaggcaggagaatcgcttgaacccaggaggcagaggttgcagtgagcccagattgcaccattgcactccagcctgtgcaacaagagtaaaattctgtctctaaataaataataataaaataaaataggtttcttgtaggcagcagttacctctttttttaaatctgataatctgtcttttaactgaaacatttactccttttacattaatgtgactgctgataatgtaaatatagatgtgtttgaattgaaattgaccatattattctttgtttcctacttatcccatctgttctttgtttttactcattttatgccttgttttgtattaactgattccattttatccccttggttggcatattaacaattcattccctcctgctttcttcttaatggttgctttatggttcattatatacattttgaacacacaatctaccttcaagtaatattataccacttcatgaacaccataagtagtacactacaacaatatacttccatttccattaccaatataatattgtatcacttcatgtacaatttaagaaccttagaataatacactgccatttcccttctcccagtctttgtgctactgttgccatttgtttgtttccttacatgttactgacagtggtatgcatgagttggtttatactggttcacaagttggttgttgaactttcagtaataaatactcaaaactcattacatcctaattattttactacattttactttgtctaacacatacatctattgtacattaatgttggaaatactatataatggtatattactgtgtatctattcccagctctgcatttagtgacatcatgttggtagcttgaaaaccaccactgtggctgtatttacagcatggaaattggcaaacggtaccatcaaggcaaagaggaggttgttaaccattttctggcagtccagtggttataacctcccccttgcccacccacaatatactattgttatctttactaaaacagcacattaccttggaagagaatttttaaaataagtcttttatatttattatttccattgttcttcattcctttatgtagatccagatttccacctgttatctttttcctttgacctcaatggcttgacatttcttacgacacaggtctgctgttgatagtctttcagcttttgtaaatttgagaaagtcttccttttcctttgttttttcaaaaatattttctttttgagatggagtcttgctgtgtcacccaggctggagtgcagtgacgcaatcttggctcactgtaacctctgcctccctggttcaagcaattctccctgcctcagcctcccaagtagctgggactacaggcatccgccaccagagtaatttttatattttttagtagagacggggtttcgccatgttgaccaggttggtcttggtctcctgacttcaggtgatccacctgccttggcttcccaaagtgctgagattacaggcgtgagccactgcggctggcccaaaaatattttcactgtgtacagaattctaggtcaaagcttttttctttcagaatgatctcttccactgacttctagtgttcaatgtttctgtcaagaagtttggcccgggcatggtggctcacacctgtaatcccagcactttggaaggccaaggcaggaggtcaagagatcaagaccatcctagccaatatggtgaaaccctgtctcggctaaacatacaaaaattagctgggcgtggtggtgcacacctgtagtcccagctactcgggaggctgaggcaggagaatcgcttgaacctgggaggcggaggttgcagtgagccgagatctcgccactacactccagcctggtgacacaataagattccgtctcaaaaaaaaaaaaaaaaaaaaaagtctgttgccattcttaagtcctagcatgttctgcattctgtcagtgcttttttaaagatttttttctttttatcactggttttaagcaatttaattatgcttcttagcatacttcatgtttcatgtgctcaaggtttgtggaacttagatttatggtcaaatttgatattttttcagccattattttaaattttttttctgacctcataaggcctctccagggactccaattacaaacacttgaagttatcccacagttcattatgggttttttttttaattctgtatgtttcatcgttggtaatcaattactgtatcttcaagttcactaatcctttcttctgtagtgtttgagctattgttaatcccatccagtgtatttttcatctctataaattcaatttgtgtatgtatgtgtgtgtatttacctacatatacacatatgcattcacatacgtatgtatttatcttccatgtctctccttaatatgcaaatgctttcttttattttcatgaatatatggaacataactaaaatagctgcttaaatgtccttggcaactaagtctatcatttgtatcatttctgtgttagttgagttccacagagccaggcatggtggctcacacctacaattccagcactttgggaggccaaggcaggaggattgcttgcatccaggaatttcagaccagcctgggaaacacagtgagacgtccatctctacaaaaaagtacaaaaattagctgggtgtggtggcgtgcacctgtagtcccagctactctggaggctgaggttgcaggatcatctgagcccaggaaggtgaggctgaagtgagtcaaagtcacaccactgcactctagcctgggcaacagagcaagaccctgtctctactattaaaatacttaaatagttaaaagttcccaagacaacctcatagatttggctaaataaaaatgataaattttcaaagaggcctggaaaatactttcgcaaaatatggcagaaatgatgtcttatttaatataataattttacaaaacagtaacctaatggaaaaaaataaagatatataaacaggcaagttcatataataagtacaagtagacaaaaaatatatcccccaaattgccactgataatagtaaaaactaaaacaaactacaaccatttaccacttctctaattggcaaagatttcaaaagactaataatacccaccactgcataaagttttagaaaaataaacaaacttctttttttttattatttatttttatttttttgagacggagtattgttctatcacccaggctggagtgcaatggcacgatctcagctcactgcaacctccgcctcccaggttcaagtgattctcctgccttagcctcctgagtagctgggattacaggcacgtgccaccatgcccagctaaatttttttgtatttttagtagagacagggtttcacagtgttacttgggctggtcttgaactcctgacctcatgatccgcccacctcggcctcccaaagtgctaggattacaggcgtgagccactgcacccagccagaaacaaacttgttatacattgctgatatgagtgtacattaatacaacctttctgaggggcaatttgaaaataggtttcaagagccttaatttttgtactcttttcaacttccagacatttaatctaagaaaaaaacttaaattcacaaaaatgtatgtaaagaatacccaatgtaatattatttatagtgaagaaacattaaaaaccctcctcaacattcaacaaaaggaaactggttaaagtagaatgcatctataatgcaattataagaaatcacttgaaacaatactattgatatgtaactgccaacctgaaaagatggttaccatagagtattaacagaaaaatgtctgttttagactacaggtatgtcataattctgacactgtaaataaatacaatatgtattcattcaaatatcaggaaaagggtagcacaaatttaaagtttaagaacagaacaagtttaaatatatgcccacaaattattttaaattctttccttcaaaagagagcacctaattccactttctttgtgtctgtactgcacttagtgactggcttctaacaaacaaaatgtagaagaagtgacagcagcagcttgtgaattctgaaactaggtcataaaagcatatagcttcctccttcctctctctctaggatcactccctctggggaagccagctgccctgtcgtgaggatactcatacaatcctttgaaaaggccaacaaggtgaggaactgaaacttcctgccaacagccagcaaggaactaaggcctcctaacaacagccatgtgagcaggccatattagaaacatcctcaaggccgggcgcggtggctcaagcctgtaatcccagcacttttgggaggctgaggcaggcgatcactaggtcaggagattgagaccatcctggctaacacggtgaaaccccggctctactaaaaatacaaaaaattagccgggcgtggtggcgggcgcctgtagtcccagctactccggaggctgaggcaggagaatggcgtgaacctgggaggcagagcttgcagtgagcagagatcgcgccactgcactccagcctgggcaacagagcaagactctgtcaaaaaaaaaaaaaagaggaaaaaaaaaaaagaaacatcctccagccacggtcaaatccagagaactccagcccctagggccagactgcaaacttcaagatggaccctgatccagaactacacagctaagccactcctgaaactcctgcattcctgactcagagataaatgtctggtgtttaaaccactaagctaagccattcctgaattcctaactcagaaataaatgtttggtgttttaaactactaagttttggggcaaaacctcacaactttactgtgttggtttcacataattctatttactgaacacagtaaaactttaataacctacacttccctaaaagagcctacaaaatttataggactttgtataaatctactacaactagaaatggtcaaaaacaagaataagaacaacacattaagcaatcacaagaatttccaaaatgtaagagagtgaaagtactcatgataaataatgcaccaaaatctaagaaaagtatgatcactatataaagctactggaagaatttaccatgtccctggagctgaaaatggtcgaatgagtgaaaacactcaactctcacctcaccctctttatcttcagagcttagactgataaaactctaaagcatgtttcttattgcatataaatccttaaatccttcttcactatgaccagtgacagaaagaatgaattaaattacttgcctagggtcatttcaagagctaggagaaggattgaaatgactccgtaagaggtctaggggagcactaaactgcatctgggaattctgtctcagagctaagaagctaaaagaagctcagcaaggagtgctggcaggagctttgaaacagatttaagactaactgctttttagctaatggaaatgacaaccagctgctaaatagatttgggagggttaatttatgcatcagatcaaaatatatgaagtcaactgcccagtaaatcttgcttcttactgacagctattcaatttgattaggtttatttatatctcccaaattaccatagacacttatcctggacaaatgtcatgccctgaaccttttgataatctctaaattcctgaatatgcctacagattacagttttctttataatactgattaactggtacctgaaaaatagtacccctttatatctctaaagattctgcaaacatagggctaaagtaattaaaaaggaaaaaaaaaatccaccaaagaaaattctcacataaactatagtaaaatgagccatgaacttttaaaataatacaacatcaaaatcataaacatgatcactgattgtatgtttgtgtagtggtgcaggaaataatacattaaaatgctgaaagggaaaggctgaatgaagacaagttagaacgaaaggcttcaaacctgagcatgtgccaaaaccacctagaagtcttgctaaaacagagattgaggggctctgccactcaagagtttctcattcaatagttctgggcaggagcgtgagattttgcagatgttgcaggtgtggggaccacaacttgagacccaccaagttacagtattatgttactaacataactaaccaacttgacctggtggatcatcaggatttggttgattatacctagaccaaagaagcaagcaaatcaggtcagagagaagagtgaggcaaacgtggggcataatggatgagagatcaggtgctgcccaaactttccactcccctctttcttccttccttcctccatctctcttcctcaaaaggaactagattcagttctcaggcatctttaaagttccctccattacacgattccatggacagatcacaattattcttcagtagtcccgaatgcctgatgctcacatctctttttgggatgtgtatgtttgggatgtatgagaaggtatcttcttcaaatgtgggtttcattacaattttgaattcatacaaaccatagcccttcctcccttttatgagcttcttcagctcagttccaggagcaatatatagtgagttggggcagcctcccactattaacttcatatctggcaaaacatatttgaaatttgcaaaatcaaccttcacttgtcagttcaatgtcttcaccatctgttacttctcacatttcctgtgcataacttcacacaataccttaagagtcctttcagcattctcaagttttctttcttatttgatgagcaatattttcattggttggaataatcactgaaacactttcactaacttcttgttgctgtcacttccattgtaacagatggtagacctgttcagttccgtaggtttagcttccaccacattcaacattctgaagttacctacaacttctatattccacctagaaaccatcacttttgtagacttcaggattttaatcaccgccttcccagctgaatttatttttgtggtacttttccataggaaaaaaaaaaaaggtcacaggcacaaaagttaaagtgtgcaatgtcatgagcaaggagacacaactgaacttcgctgaaacaatgaagctgggcagcaggcctcactcagggtgggcttaactcaaatttcagcctcagaaaaattaccaattacactctgtcatgaggatttagaggccttaggaatgactcaatgttaactcttggaatgtctaaggtccagtatacccctatttactcttaactcctctaaaggaacaaacatacgtagctacctcctttagataagaactatgactgtgtcaaaggtgatgcacactgctgtgtgtgtggaaatcaggatgatgacgctagacagctccacagctccaactgagtcaagttttcactgtgacatgcttttatcaggagtgctgtggtgtttcttctgagcatacacacactcctaagtacataataaaataaaaattcgaaagccaagcatgaatgattttgggataatctacaccactgtttctctctcttcaaacggtgaaaaaacgaactatatttccattttctttgctgcaaacagacttcggccaagatgacttcagacaatgattaagagccacgtccctacaatcatataagtcccaatataattaaaaattcttttccagtggttctaactaggaggttgggttatagagtttactttctactgtgtaatacacagctattgtttaaattagtcttttataaacaaaaattccaagagcaaaacaatttcctaaaaactttatgttccactcctctctactgcattagataataatcaactcactgcccttttccctacaaagctgatcacattaaatatgttgagtctggattcaaaagttcaaaaactgaccttaagaagctatcttgtatagacatgacatcagaaaaataccttaaacccattccaaatagatggcttctctcaacttattaggaatctctttaaaaaattataaaacctcctataattagcctattactaagatttaccttttggaaattttagaagctttgttttaaaacttcttagaaccacacacaaaatccatagagttctcacttaaatgttttctaattactataaatacagccccattaacaaaagtttaaaagaaaaggaagttaaaaaaaaaaaaaagacacaacaacataaccataatcctactatcttcatagtaaacggattggtgaattttcgtccattttaaaaatttgcatacctttttacatagttgtaatcattacatatacacaactttacatcctgctttaaccccttcacacacctttgtatcatacacacctttctaagttgtcattttatatctaaaggactgcaaaatattccataagttatcatttgtttaccagtttctttattgttcaagattgtttctgatcttttattctataaactgctaggtcaaatagcatgaattttctgactccagatccctatttaatgttaccatttctttctagccagcagctctaaaccagctatcaatcaaaatgagcaaaaataagcatgtttctactactgaattatttttcccacaggaatgagcaacttttccggacattctcaaacccagcaaaacaccaataggtttttccaatccttgcctctgtcttcacatcacctttttctctatatctccatgtgtcctctttgtttcttataaggaccagtaattagatttagggtccattataatccagtatgatctcatcttaactaattatgtctgtaaagaccctaaggtcacattctgaggttttagctggacagaattgggggacaataaactcctacactactgacctccgatctaaataagtctaattttctttggttttacaacgtttttatttttaattaaataactatttatagtactacctttgttcagtattgctttaacgtattttcaatataatgcagtgagagtacagtagtcccccttatccatgatttcgctttctgtgatttcagttacccacagccaacctgagtcagaacatatgaatggtatagtaagatattttcagagagaaagaaaccacgtacatataacttttattatggtatactgttataattattctattttattcttagttattgttgttaatctcttactgtgcctaatttataaattaaactttatcacaggtatgtttatataggaaaaaaccctaagtacagtatattgagggttcagtactatccccagtttcaggcatccactgggagtcttggaacaaattctcccaagataaaagaggaatactgtattaagattaccacaaaaaaaaattacttaatcactaaatcttacctgagatcaagcacttcttaccagcaaagctccaaatagattgctagggaaatatggcattttgacttttaaatattaaagtcaaatgccccagaagaccaaagtatcatgcctctatgcactgtatctggaaattcaaactactatagatacacaaaggacacagtgatttttgtctgtagtagggcaatttcttgactaaggtccaatcatcagtgtatgagtagactgtaccagtgttaccacttcagctctaagttaaacaagtcttgctgtttatttaactagagaagctctcttagcactcagaaaagacttaaaaaccacgaagatggaccctgcagactatcacaatcttacatattcaacaatcttataaacttttgcaacctactcacaacaccaaatagaactagtatccaccaattaaataaaccaactggaaagtgaactaaaatgttaatacatgtacaaaagatccgcatattcattgtaaaacactgaagagaacataattatttggcaaacattcatttaaccagcatctagggtaaaaacagaatgtttttaaaaaaatagtgccccaacattcattgagttgtaagacatactgagaaatgccaatgacttttttttttttgagatggagtcttgctctgtcgccaggctggagtgcagtggcgcaatctcagctcaccgcaagctccgcctcccaggttcaagtgattctccctcctcaggctccggagttgctgggactacaggctcccaccaccacgcccagctaatttttttcgtatttttagtagagatgaggtttcaccatgttggccaggatggtctccatctcttgaccttgtgatccacctacctcggcctcccaaagtgctgggattacaggcataagccaccgcacctggcctgttacctttttgatacttatattgtgtatatctgcagaaatactcaactttggatgggatgagatattcacagcagaattacttttgaggttttctcaaattaatgatttggagccctaaaataataattacaaggttctgacttaatttccattgtgataccacttaggccttgtcttccccacaggtaatctcctcaggggaaaagaaagtggaaagaatagaacattcagttatttttttgtttgaaacgacagttttgtttaaaaatggaacggcggtggcttctagccttcaaataaaacatatatttttaaaaattcacatttagaaagatttaatattctggtactctattaaatttcaactcatattaaattgagttttatatgatctacatgagcatctctatacctggcagtaggcaggcaacaacacagattccagccctcaaaaaacttaaagtctagtaaaataataaccaggcaactgcagtataattttgtagaaactataatagaaaaagtacagtgtactagggaatcacatgagatacaaattccaggccaggcacggtggctcacgcctgtaatcccagcactttgggaggccgaggtgggtgaatcacctgaggtaaggagtttgagaccagcctgaccaacatggagaaatcccgtctctactaaaaatataaaaaaattagccgggcttggtggcgcatgcctgtaatctcagctactcaggaggctgaggcaggagaatcgcttgaacccaggaggcggaggtgcagtgagccaacatggtgccattgcaccccagcctgggcgacaagagtgaaactccgtctcaaaaaaaaaaaacaaaaaaaaacagagagatgaattctaaacaaaagtgactattttagacaagtacttagcataagagaactattaaaaagtatccatgtgcatataattagcgtgataaattttatcaatatatgtaatcatgtaaagtacagattgattacatcatactgtcaacttcccaatttctatctccagcccagtcttcttcacttgaattacagattgattacatcatactgtcaacttcccaatttctatctccagcccagtcttcttcacttgaatccagtttcctatggtcatctgtccactactccacagatctactttaatggctcctcctacttatctaagattaactcatcttcagaaaagatgattccattcattgagtgtcttggatcaaaacccaaagcctcttcctcaacttctctctctcacacaccccagacccaatccaagctccacctctgccctatctttaaaaaacacagtcatgcaccgcataactttttggtcaagacagaccacacacacataggatgatggtcccgtaagattataatggaggtgaaaaattcctattgcctaattcaattattttaaaaataaatttagtgtagcctaagtgtccagtgtttatacagtctacagtagtgtacagtaatgtcctaggccttcatattctctcaccactcactcactgacccacccaaagcaattcccggcctgcaaactccactcacagtaagtaccctagagaggtgtaccattttttatcctttatactgtatttttactattatttttttctatatttagaagtttagatacactaatacttcccattgtgttacaactgcctacaatattcagtacagtaacacgctgcacaggtttatagcctaggagcaaaaggctatataccatacagcatagagaggtgtggagtaagctgtatcatctaggtttgtgtaatacactccatgacgttcacacaagaacaaaattgcctaatggcacatttctcagaatgtgtccctgttgttaaacaacacatgaatgtaaaaacatcttagtcctattttaggtttataagctatgtgaatacaagaattataccttcttctttatgcttctccccaagaaatcataagccttagagcaaatactcaatacatacgattgtattttaattaatttaaatttacttaaaattttagagtagtaccttaattttatgtccttgaattttagagtaattacaattaatagaaaatataacttgctggaaaaactaagaccgattattattgagaactctgaattcaccatcactctctcaataactatgtaacaaagaagatgtgagagtttcttttttgtataacaaagaagaaaattatcttgtggtcacatattgcaataatcccaaagattgaaataatcccaaaagacttgaaataataatgccaaaagacttgaaaaaaatccaattaataccttcatcttacactaaaccagatttcgctatgaaagacaataagggcaactttatttataaaaaatttttaaactaaaagctgacaaattttgaataacatactgatttaaactaattcctgatgcattcacctcaaagtcctcatttcttggaatttcctcaaatagttctgactctctttatctcctatagacaatcctgagctcatctaatcccaaacaaatttaaaaggaaaacaaaactatatttaaaagctttagagttgaagaatataatctcatactatctgagacaaagttccatgtagataaatagaaaattatgtctttcaaaaaagatgtcaagctaatccttgaagatctaatttcaacattgcaaacaacatttagatagcccaattacagaaaggagtgtacacacaatataccacaaaattcttactgtcttttttattttcctataaatggtttgccttgggagtacagttttatctatctctcaaaagaaacgagttttctcaaaaatattaggaccaacaagaacagcaaaaaaagaatcaactaaccaaataacaagccatcctcaaagaatacttgttcatcagttccactgctatgatcatttttatgccttatgcctttgaagaaaaatcaggaaagcaggagaaaagaacaagcataaatcactagaaataaataacagagaatgtttcctttccttccaaatgtatcagtaaatcctttttggaattaccataagaaataaatcaagaacaaaatggcagaaaggagtcaagtaatagaaattgctgttttttatgacagagttacttaaatcttattaccaattctcccttcttctaagtgtttatacatacatcacagatagaggattttcctgtgttccaaataaagatagcacttctcagggtaaggatatgatataaaattcttcagtttgagtttttgttttgtttcactttccctacaaatagatgaacagaagtccgggagggcactttgtttgcatttagaatactacaaaagaaacagaacaaccattacttctattaaaagagaacttttaaagtcatttaaaattatatgcagaagagaatgaattagataaaaatattttgaaatattttatattctattatttcaaacattaaaaaaaaaagcaacactggcaatctatatgcatgggggtgaaaaagaatcttgacctctgccacacaccatacctagatattaacacaggagaatatcttcatgaccttaacataggcaaggtttcttaagtagacacccacaaaaaccaatcattattaaaagacagacacagaatacattaaaactaaaagtgtatgccatcgaaagacaccattaagacagtggaaaaaggtcgggcatggtggcttatacctataatcccaacactttgagagtctgagataggaggatcacttaggcccaggagtgtgggaccagcctgagcaacatggcaagactctcagtctctacaaaaaaaattaaaaagttagccaggtgtggggcgcatgcttgtagtcctagttactcaggaagctgaggtgggaagatctcttgagcccaggagttcaaggttgcagtgacctctatgattataccactgtataatatatacagtgtatattatactgtatatgtataacctatgcagtgtatattatactgtatatgtataacctatgcagtgtatattacactgtatatgtataacctatgcagtgtatattatactgtatatgtataacctatgcagtgtatattacactgtatatgtataacctatgcagtgtatattatactgtatatgtataacctatgcagtgtatattatactgtatatgtataacctatgcagtgtatattatactgtatatgtataacctatgcagtgcatattatactgtatatgtataacctatgcagtgcatattatactgtatatgtataacctatgcagtgtatattatactgtatatgtataacctatgcagtgtatattatactgtatatgtataacctatgcagtgtatattatactgtatatgtataacctatgcagtgtatattatactgtatatgtataacctatgcagtgtatattatactgtatatgtataatatatgcagtgtatattatactgtatatgtataatatatagtgtatattatactgtatatgtataatatatacagtgtatattatactgtgtgtatgtatatgtgtgtttacatatatacacacacacactgtatattataccagcctgggccacagagcgagaccgtgttcttaaaaaaaagagggggatggggggatgggggcaggcaagccacagactagaaaaaaaagataactgtaacatatataactagcaaagcgttcatatccagaatacatttaaaaagcctctaacaattactttttcttttattttctttttctcactctgttgcctaggctgaagtgcagtggcatgatcatagctcactgcaacctttaactcctaggttcaagtgatcctcccaccttggcctcccagcccaaggtgctgggattacaggtgtgacccactgtgccaggcccaaattagtttttgaaaaagggcaacccaataaaaaatgaataaaaaaactagacaccttccccctacacatacacccccgatatggtttgactctgtttccccacccaaatctcatcataaatcgtaacccttacgtgtcaggggagggacctgatgggaagtgattggatcatgggggcagtttctcccatgctgttctcatgatggtgagtgagttctcatgagatctgatggtttcataaggggctcttccctgttcacttctctctctttcctgccccctggtgaagaaggtacttgcctctccttcaacttccgccattaactgttaagtttcctgaggtccttccagccatttggaactgtgagtcaattacacatctttccctttatatatttcccagtctcaggcagttctttatagcagtgtgaaaacggactaatacacacacccacccacccccaatatctatagaaccaataaaaatcttagtttcagggaaatgcgaattaaaatcacaatgagcccaaactatacaccaaccacaacggttgagcttaagaccaacaatagcaaacgttgacaaggatgtgaagcaataagaactctcatatattgctgtggaaatataaactggtataatctctttacaattgtttgcagaatctactaaagttaaaacataaataccctataacttatccactccattcctacagatttaccaaagcaaaaaaatacatgtaaattgcactagaagatgcacaagaatgttcatggcggcattatttgtaattaggtaggaaaaagaaaacctggaaacacagctgtccaaaaacagtagtagtattaactgtggtataattatacaatgtaaaactacatagcaatgacctcctacatgcaaaatgatggctgaatctcacaatcttaagttaaacacaaaagagtacatatgataagctactatttatataaagctcaaaatgagcagaactaagctagagtgttagaaattaggacagcagttattttggagtgggtaggtaataactaggagggggaaaagcgggggacttgggatgctgacagtattttgagctcagtagtaaccacttggtgatgaagacttgcatacctttctgaatgtatgttatattctaataaaagatctgatttttcttaaaaactatgtgatttagaaaaactaatgataaacagacaaatgtttaaattaaaatttctagcatacaaactgttaacaccaatatgaacccttaacatatccagagagcatagtcttccagaacaaaacatttgagattatttctaaatctgattttatatttaagacttttaaggcataaaattaaaacataaaatgattaaagcattaggcagtatgctttctccattctccaccctactctcaaaatttatcttctgccacttacctttattcaaccctcactgagcttctccctggttccaacatgccgttccttaccaacttgccctgcctgaaacaacttctctgaactccaatctaattttttatttggaatctacaggactggacttctcccctacaaaaggcataattagtacgtttctaccttgttaatactcctcaagacaacttcacaagttgtcatttgcccaagtaagttccacgctccaacagagggcagtaactcatccatttatacattctcggtgttttcacacagtagaaaaatggatgaaaacatgtacatatgtgttttacagaagaaacatattactttcaattcaatcaatatttattaagtgcttgttaagtacctatgatacttagcccaaattaggaaatcagaaataaagttactttgatccagctgcattttgaagtccatgtcctgctatccctactttagttagcactatgatgttctggagccataaatactgtaactgtgatgcttagaacagtttcaatcatcaaaattattctgcttgggagggtgtgttaatccccacatgctcaggctccactttgctcttttccttccctggaatcgaatctgccctcttccccacatgtacccctccaaaaagacttgggaaccttatcacttccttcctgggttgctccactgttttcttgctgttcaggctcagctctgcagttcctgcagactccatgctcctccctttctttgggccactcagtccttcctctgacccactggtgagccaacctttcttcttttctttggcctctcttccatcaacaactggaaaaaggggtagctcgtatcctcataaccccctctgctcattcttctagcccttctttgcctctgggtgctcacatacacacattctggccaagaaagtagtcaggggagtgagagaaaagaaaggcaacaaggaaaaaacggttaaaaaaaatagaaaaagtaaaaatattaatggtactagacataagtcaaaacaacacaaagccaatgtgttcctagagactaggagtgatgctctgtgtatgcaaatgtgaatgacataaaagttaaatatgaaatatgagaaaaacaagacataggtaagaaaatgtgttaaaatgctgaagagacagaaggtaaatgcctatgacttggaaagaaatatgagaaaccatggacataaaaacaaacagaggccaggcacagtggttcacgcctataatcccagcactttgggaggcagaggcaggcggaccacttgacgtcaggagtttgagaccagtctggccaacatggggaaacccatctctagtaaaaatacaaaaattagccgggcatggtggtgcatgcctgtagtctcagctactcaagaggctgaggcaggagaatcacttgaatccgggaggcagaggttgcagtaagccaagatcacgccattgcactccagcctgggcgacggacggacagagggaggctccatatactaactaacaatttctgcttgatgcatctctttagcatcaaacctaccaggcaaaacatgtcacctcagcaaattcacaattaaaaattaattactcagaacaattaattagaaattagcagccaggagtggtggctcacatctgtaatcccagcactttgggaggccaaggcaagcggattacttgaggccaggagtttgagaccagcctggccaacatggtgaaaccccgtctctactaaaaatacaaaaactagcagggtgtgggcacctctaatccctgctacttgggaggctgaggcaggagaatcactggggcccaggagaaggaggctgcagtgagccaagatcatgccactgcactccagcctgggagatagggcaagaaagggaaggagggagggagggagggagggagggagggagggagggagggagggagggagggagggaaggaagcaaggaaggaaggaattagctgtaattcaactctcaacttaatttgcacaaataccaacaaagggaatttctggttaagtaaaagtggatttcagctgaacttctctctatgtctcctccaccaacagtgacaagagattcttacccctaaagattgagttcatgtttacaaaagctcactattaagtcatgcaaagaatgcaggtagccggagaagccagctcagcatcgaatagcttcaaggcactctagaaaataaagccctactctaaataggttattattaggatcataagcagaaactcgctaaacaacaaaacaagtaacatgaaccaaagtaaatatcaaactgagagggtttttacaacagagactcttcttttcatatgctcccccgagacaaacagcccattcttcagccaccctcactcactttccccttgagaattttaactgcatataatgaaagatgttataggtgagtttgtatgcattatccatgactaatctagaagcagaaaaaaagttgagatcaccactatatacctaatattaactatagagccagctttaaaacataactgaagactgaacttactaaaaataatcaaaccacaaaaactatacagttgacccaaataaattacattttatgcaacacaaactctaaagcgttaatttataacgcaaacgaagaacattcggatatccctgttgttcaaaaccttccccacctgttctctgtccccagaagtgacaagtgtgtaaagggccttctatgcactctgcctcccactggattcagccagtggggggtggggagagaagagagtgtggtcaagggtatctattctccggacaccctccctattaggtggcctccagctggccgtgccctggtctgaagttctctcaaggtgcagtcagctctagctaaagggtctagcatctcctgctaggttctataaatctcttcttccactcatccctttggggtgtgggttaataacatctccagcagttgataatttcaggcattttctacactaaaccttgcagttccccaataccctgtccacatccttctaaaattctcctgatttaagtgtgctatttcctgttgagatcttgactattatacttgttaaaaagaggaaaaatgttttaatgaacatttaagagatatgttctgtttataagcagtaaggcccaagcaaataaacaaaaaccctcagctatattttcaatatgaatacaggtgagggaaggtcaaagaactgcacttctgctgtagaacacacactgtattctacaagggtatcataaataaatggtttatgatagatgaatggagagagatgcctgaaagggggaaaatacagcaggaagatccggggaacctgcacactgtgcaactatcattctttctattccagatgctctcattctttagctgtgcaccttaaacacatcctttgagctcagtttcctaatgtaaggcatagattctatgagatgaactctgcggtcctttctagcttcaaaattttctaaatagtatgtctgtcttgtgatgacaggttaaaaagaatggataatgcttctgaacagggaatatcacagcctctcagtggcctttgtaaccacctcaagagatgtcccagccaacagactgtacatcctcagagtcttgctaccaacagtggcccccattagtaagtgaaagctcactgatataaaccaaatgacataaagtacatgaaacaaaatgttatttttagtatcctttcattgtccattttatacaatagcctatttaccactcctctggttcttttcttcctctttatgagtgattatccaagatcactgcagcttccctttctttccttaaaatctcactcattgtctgtgaactccattcagtagagaatatttcaaagccagaggaaggatgggaaattcaaataagtcaattttgctacttaataattgtactaaaacattgtagctttggaagggagcttaagtctaattgctaaaactaaaatttgccaattttctgagttttgttttttgttttgttttgttttgttttgtttttaaacatgcccattcttttcacaggtatctagtggacacacaagaagatccaggaacatctgttttattaccactggatttcactggggacctttctggctcttacaggggttgccttgatctgtgaatcaatcagacacagtgaccacccagacagctcagccacagagttcaaagaagagaaggtgaggcaaactctaggaagcaaatgagcaataaaaaacaagagggaaaggttcatttttgcataggagttttgctagagttgtcaaagcaggcctataaacgctcataatgcaaatacttcaacaacataactctaaaatgtttctgaagacttttaaaagggtctttcttttcttagtaatttaatatgttctactttaacaaaagtagggcacttctgtgagtcaactcccgtaaactatctcagagtttaaattttgcttcataagatatatcagtgtagactagggagtaccaagaagtaaaggattgtgtattttggtcattttcaaagaaaaatttaagaaagatgcaagataggacaaaaaggatgagtggaatcatgcacacctggatcccaagcaaagcaatttaatttctttctgaataatttataaaacataataccaatttctgaggcacgtggtgaggtgttagttttgggtccagcagcatcaggatcacctgagaacctgttagaaaagcaaatttgtgggccttactccgaactatttaataagaaactctggggttggggaccagccacctgggcttttatgagccttctaggtgattctgatgcatgctcaagtttgagaagcactattataaggagggaatgaagtcaagtttacaaaatctgtagcttggaaaaaggaatcaactattttatttaagattttaattctttcctttccaagacatgtactgagagttactatgtaacaggaaatatttaaacatacatggccctatatgccttccattagtcaggataaaacagaacattaaatcatggtcagtcttatagtgtcctcaggttttaggaattacattctactgagccataatcaacctctctccccggcaatgcttatcctgagattcctcataatttcactgtaccaagagatgaaaaattatatcatttaatgtagggaacactgagacacttaaaggtatacaaatgtgttataattagggacttaaattaatcaaggtctgcacataacaagttgaagaacggtaagaaaataagagatgacaaggtttccagataattagcacttggcttatttcctcatttccttcaagtctctgctcaagtcaaagcaaggcctgccctgaccgtccatctgtaatagtgcaaccccgattccctagcacctccttaccctgccctacttctcttttttccacagcacctaccatatagtgtgttataaaactgatgtgttatgcttattggttatttcttctgcccactaggatataagctttatggggacacagagcattgtccatggggacacatggatatatcttgggcacctacaacagtgcctggggcagagaagtcattcaatacctgacacacagtggcctcaaacaaaagttgtggaattaacagctgggcaatatttacgatatattatggtaaaaaatgtttaagatgtgaacatctttcggaaaaggaataaaaaaagttttggttacagaagaataatctattcctacccaaacaggtcggaaggtatgcacttgatttatcagctttacctttaaataccttgaggatttatatgaaataagatttatatgaaataagatcaatgttgattattgttcaataaaatcagatatctgtatctcacttgggcaatatttatatatcttctgcctatctacagaattctaagaaatggcaatctgggcttgaattgccaaagaaatagaaaatagaatttctcttcccaaaaaattagcaatccagatgacaatatgcaatctataaacaaaacactaatcaacagttttctgaaacaactgtaaattcataacaagtttattctctcttccagcagatggctgaccaaaacagcactttgttcatgtttttaacaaattttccagaaagaataatcatgctcaaatgctttctcttgtctttgtttatggacagggtccctggcacattctatctaaaggcacctacctgactatgcaccaagaaaagaactgaactttttctattctaataaccttcaactcttccctatttcaaatattcaaatacttccatctgtaaagttcggccaagttcataaactatctggcaaaaataacaaaatacaaaaagacctgggaccttggcagggaaaggaatgaaggttaaagttatgtttgaacaattccttcctctcctctactaggttcaaagtctttcttttaactactaattcatcatggaagcaatgcagcacagtagttccaaaacatggattccaaagccagacagcttaggtttgacctctgcctcttactctctctactgacctctctgtcttagtttcctccctgtaaaatggtaaaaacaataacaccttcctgttgtgaggattaaataggccaatataactgtaaagcacaatgatacttcatatttactattattattacagctctgaaaattctgagttttacaaacttggaatttacttttaacaaggtacttcaacaaaatccattatcactaacaaatttcagatttgtcaaggaattaatcacaagctatacctgctttgtaaaccgtggactcacacaggaaactaacaagtaaagtggtcagagtatgggaagctccataacctttcaaagaatgacaagtgtcaatgtcacatggcaagaaattaggaagccattaacataccctgagtagaaggatgacatagtaaaactgtatctccagaacattactttaatagctgtgtacaggacagtttagacaagagactcgaagcagcaaactagcaagaaacttgcacagcacgtaactatgcaataatccaggcaattgatcaataagattttagattagaaggtgaaattgagtgggaagggctaggggtcatattaaaagtctgagagtagtgaggggcaacaggatattggaggcgctaagggatgtctatgctttctgcagcatgggatagaagataagttttcatttctaattcaggtgttcatgggctcaactgaaaagattcctgtaaagattcctgtagagaagaggtcaactaccatccagtgaccaagtccagcttatggtttgtttctgagtgaccagtgagttaagaatggtttttacaatttttgttgttgtttttttttttttttttttttgagatggagtctcactctgtcgcccaggctggagtgcagtggtgtgatctcagcttggctcggctcggctcactgcaacctccacctcccgggttcaagcaattctcctgcctcagcctcccgagtagctgggactacaggcgcacgccaccactcccagctaattttttgtattttagtagagatgaggtttcaccgtgttgccaaggctcgttgtgaactcctgagctcagggaatccgcccacctcagcctcccaaagtgctgggattacaagtgtgagccatcgcgcccggccagtttttacatttttaaagtaaaaaatttagagggttgtaaaaaaccaattaagaatatgcaacaaagacctacgagaactgcacagcctaaaatattatatttattacctagtcctttacagaaaacatttgccaacccttgttttcaagcagtatcaaagcagatttcaaaataagctgaaactgatggataataaagaggctgggggatacacagtgtcagcccacttttttccttattctattgcccttaagagtttgttccctactccatctacttaatccttaatgtggttaggttagtaaaagtattgatgctcattagaaacaaatcttccccagcactgaaaacaccacactacagagtccacttggagcatttacataacaagggccagttcctgtgtgtgcttcatcttttgctggtcaacaataaatctacaaatacaaactgagtcatttgtgtaaaaaaaagctagttctttaaattgttaattgtagattaaaacagtaataattaagcaagtcaccatagctcatgcctgtaatcccatcactttgggaagccaaggcaggaggatcccttgagtccaggagttgaaaatcaaccttgacaacacagcaagatcctatctctaaaaaaagaaaaaaaatcaaaacttagctgggcatggtgatgtgcagctgtagtcccatctacttagaaggttgaggttaagaggatcactagagtcagggaattcaaggttgcagtgagctatgactgtgctactgcactcagcatggttgacagagtgagaatctgccttaaaaaaaaaaaaaagtaataattaaactctcaacaaaaaatacacttgtggaatgaaaagtcattcccatatccaaaatcgcagactaatatactaatttataaaatgttctagagagggacttagagctgcttctggaaagaaaaaaaacaacaaaacaaaacaagcacttcaaatctatcacttttttcgggggggatagatatataagtgtgcaggtatatatgtatgcatatgtatacaaaatatatatgacatttcaccttaagttttaaaagaaggtttatcataatcttccatgagagccacataacctcccaatattaaaaaatgctggtttaatttctttaacaaaacttgtctttcaggaaagcaagttagttatggcaaaggtcactatatatgtggatagcaacaacaaaggagattcatcaatattgggaaaccaaacttgtataatttcagtttgatataggattgaacataaaggaaattaagacccaactggcaggctgacagaccccagtttgagaaacattcaactagtccaaaccacaggaggtagagcagggaattaccatcatggcacaggagttaagagaatagactctagagtcagacaggcctgtgtttgagtcctggctccacctctccctagtgtgtgaatttgggcaagttacaaattcaatcatcagtttattcctccgtagaaacagataaaactagcacttaaatcatttatgtgtagtatttggtatagtgcctaatacatagcaagcactcaataactgttaactaaattaatgttataatgtatattaagttctatgttcaataaatccaggttatggttgttactatggaagagctaaggagcaggctgactgtctggacaaggaccagtgtcaggaatggccagcgctaaactataagtagatcaagttccatcaacaggtaaatctggcagttagaatgaaatggttcaaacaggcaggcaagatgatatgaaggcgaaacagcagcaggtggtaaaacctagctttgaagattgattcattagacttggaaagaaccagaaccattattcaattttccagaatggattttctatgcaaatatctaggtgacttgttgatcatgacaagcacccccctgcaatctacattcactcgataagctttatacaggttttgttttttgttttcttttctgagacggagtctcgctctgttgcccaggctggagtgcagtggtatgatctcagctcactgcaacctctgcctcctgggttcaagtgattctcccacctcagcctcccaagttgctgggactacaggcatgcaccaccatgcccagctaatttttgtatttttagtagagacagggttacaccatgttggccaggctggtctcgaactcccaacctcaggtgatccacccacctcagcctcccaaagtgctgggattacagccatgcgccactgtgcgtgaccttttttttttttttttttttttttgagacagaggctcgctctctcaccaaggctggagtgcagtggcacaacaaccatggttcactgcagccttgacctcctgtgctcaagcaatcttcccaccttggcctcccaagtagctgcaacctaggtgcacaccaccatacctggctaataaattttttgtaaagatggggtctccctatgttgcccagactggtcacaaactcctgggctcaagcaatcctcacgtctcagactcctaaagtgctgggattacaggcgtgagccaccacatctggcttagaaacatttttaaagtttatcaatgggtgttcctttgtaacatttagagaaacaaagaagtcatcagaatacactgattagaaggcaaggagtaggttagaagagagcaaaagtggaatttagtcagaaaagagtaacaaaatcagagtttttcccaccagaagaaagtgaagccatcaaaaaaattataaaaaaatcattcatactaaaaggacatcagaataaaatctactgtttcacaccagtgcccatagaacacaaatgagacagcaaattacagttttactctggcactaacaattcaataggtcatgactgagaaaatatttcttttctaagctgcctttaagttccagctgtttgaaagatgggacactctccaagtccataagtaaagctcggtcagtatcatatgctacatggacttgactttcctatttccatagcagtcactgaaaatgatagtttgcagcataaaaagaggagtttgatttagtcactctgattagaaaaacatatgcttacatttataataacaaaatctgcttggttataggaatctaaactagaaaaatagttgttttcattatttctttattcagaaagagagaaaatgtctccaggaaaaaaaaaaaagtgtactcattaattagcagggtaataattatagttatgaaagaaaaaaatgggtacgaatccaatttacctaaggttgctttccttcaagtccacctgttaactgtgtagactcttaaccttccaatgacagtcagtatctgcaatgattaattagtcattttaataaagaacactatttcctatgaagacaaaagtctaaagtcatatcataagttccctactgttgtaaatccagcctcaaaaaaatgtcaatgacatgaagctgtactatcttgctttcctaacgcatttcatgatgctcagctaataaatttagagtacttgtttaaagatcataaaaaacagcaagaacattcaatgatgcagcaaaagagctgtcatattgctggcaggaaattggatctccctttgtagcttgaataaagtcagaagcaaagcatccctctgcagaagcaagaaaagccaagcaaaaccacaagagaaacataggaggaaactttcatttggggttgatggcaattcttaatacttttatatttttaaaattatattgaaataagcattatggagtagaatggaaattttacataacatttcaggaggaaacatgtggctacacagtgctgtcaggctagcatgcctgcctctgcttctgctcccaccctccaagcagatgagcaagtctcattactgactttttgtttgtaagtagaaactacgtatctgaacagcttgttttcaagaaaatccaatcatcccacaaaattttttaaaaactacaaatcaaccactaattattaagcgcttgctaggacaataatgaaagcatgcctgtctttgcttgtcttgggaactgtcggaaagagcctcttagtgctccaggcctttaagtccaagctccggccaggtctgtcgccagctcctcaactcagcacaccgaaaacaaagccagtcttcctccctgcaaaatcagctgcctgtcccatttctgcagtagtaaacaacattctcccagactcatgagctgcaaaacctggggtcacttttaaatactccctccctctttgccatgtatatccagttaaccacttcatcctcaagaatcatcatagcatctcttgtatccatcccttcctctcagtccccagactcagattcatgaccttaactcccactcaactaacggcaagagccacataactaatctttctatccacagtttcttcctaccacataccaccaccagcatgcatgccaccaccaggaatcatggtgggtaccttcatttgttccacttaaatgctgtgactttttataaaacattttaaatcctgatagctgctaacaataatattaatatattggctttcctaaacttgggagtcatgtggtattctagattactgagctttatagatgcccaagaatttattcttttggcaatatgttttacttcaatacttttgaatatgtcataacttgtcctgcctggtcaaaaatcaaataaatagcaagtaccttttcttgatggccttaggtcatcatcattatggggttatattagagtataataaatgatattcataaaacatccatggatactactgaggtcccagactgctggctcctactttatgaatgctacttttgatacctcctcccacgtgttttattgaaattctgtagtgtctgtttgggctgcttagaggtcttttttcgctagcctcctggcccaaggttgtgcttgcaagtgatcgctgactgacaaccaaacactaaataggtgaggtgtgcctatttatttagccttcttatttatagtcttacctttccaaatttgtaaaaaattcatggaaagcattgactctcttttatgcaatctgtatttatttcctgttattcctagctgttgttccatcataatagcccatgaaatcactagcctcacacacaatttatctttaaaaattagctggaaaataagtatacttagacacacaggacttcaactgcgataaatgacctatcaagctcattaaagaaaaagccaaagaaaatgtgttactgtgaaaagcatcaaaggtttatatgtttactttccttatactcatgtagatgaatatgcatatatatgtatatattaaattggtctcgggtgcggccttgaactacttgccttcatcactcagaacttcccagccctatagaactaaaaaggtgcattccaaacagcatcagggatttgcagcataaagaaacaaaagccagacagagcaggaacttgaagataaaaagtatggtacctggagactaggcatcagggtgcagaaggtttgtgctgtgtgagaagacactgatgaagaatggagggagtcagtccccaccccctactgcacctacaccattgaggcagagaacaaggtatttcacctctgcaaacaatatttttaaaaaagcccagaaaattctgggaacaattcagatgttttacaaaatctgaaacgttatttgtccatgtgactcttcaaaaacaaaggcattgtttttaacaactaaatctgtcatttgatcaatacagctacacacaacacatacacacataaacacacatatagccatctgagatttttttcaagcaacgattcttttaagacaaaaatgtcacctacttatatgaaaatgctctctgccattgtttgtttctgtggaaaacaacaaaatcttacatatattcactaatgcttaaggaaagaaatcacccggcatagttcagactcctgaaatattttcagctcatcttgcttccccaccccctgtgtgctcatctgacatcagtgtggttctccctgcctggtttattgccttgacacaaagccttgatgtggctttgtttaatttagctttatgggcttccctgccacaacattaagaactcagcgatgggaatggaggcaagccacttccattgcacgttaagctgggttttctgttttattatttttttttaaacacacctcttatttgctaacaacaagatgaaagggcctggtagaactggttccctttgcacaacagaaaaacagacataagaatacaaagagatgaaagaacctaagatataagaaatatataggaaaaagggggaaaaaggcattgtgagtaaaccatcttttatctggaattc

SEQ ID NO: 34 - DNA, 165857 bp, Homo sapiens
gaattcatgtaaattaaatttgtatataatatgtctgcactgtactaagatacttttaagcaagaatatatatggcagagagagccccattatttagtattgaatccttcacagtaagtcacatctttttaggtgataatattgtgtggcaaccctgaattattccacccaattaaaaaatccaattgagttaaactattacatcttgctccttacaccttagtctatgtctggtgcctctgttctctctccacaacccttacttggttcagcagaagaggcttgccacatgttcacaaatacaagcaaaaatcaggattaggagacacctgcacaggcagactcatgcctcttggcagacatcctccagttgagcaagaggagcatcagtaaagtgaagaggaaataggcagcgaagtgtttgcgtaaatatgtaacaaagacaaacccctttggcatctgaaaagcatgaaatcaaaagtatggctgaaaacatattacaataggacttaggacaacagagaattcatgaccataacaaaaaagaatgtgaaacaatgacaagtcactgaacctccaacactgctaccaagtgttatttgtgatggaggcaactggcactttcttacaaaacttttattagtcactaaaacagtttcttaggggaatcttcattccaatcagcaagactcacagctaaaaatttctcatatgtattccaagctaatgaaaatctggtgaatataggccctttttaagaaaatacaataaatcaaagttatcttcatgaggctatgtttctaatgaacatgcagcattaaaactggagcttaaaatgcagaagacagtttgactataaattaaaatcacacatatttaacataattaatttggtggaaaaaaaaaatcatcttatcccaggtgggagggtagagatatacctctaatcacactgtttttcacatggagccagaaagaggaatacaaaaccactccagaacccagtgactctcacaagtgaaggtgagcgtcagagaaacaggcagcaacaggtcaccagggcaggaaaggcctgatgtggagccaggagccaaaactgagagcccagtgatagagccaggttagacaggaacaagacatagcatttccaaacacgtaagatgaagcagacacctgtctactgtccatggcgaggccctggtaggcaggttaggtgagcaacccacattaaggcaagacatgaaatggagagaaaatttgtccaaagccacatcaaagttataatcatttagactgatgtacaaacttttctaagaccatcaattattgagtatctacggagcactttatataccttatctaatttacttaagctctcccaaaaatcttatgaggcaaatataaaatttcaacaatttttaaattaaggaaactaagatttagaagagttacatagttttcccaaactcaaatagtcaaataagtggtaaagctaacctttgagccaaggccttttggattccaaagccagtgttctcaagaataaacccaaatgtctaaatgcatgcttttcccattgaaacacacaacctggaaggttaaagttactggcagcatcctgttgttaagagttccactggcattgaaaactgtgttatgtatcacactaaccaagaagctggagaggatatgaggtatcatatagcatgagggaatccaaggaccacaaggtgtattgttgagatgcatcagtatacagtaaggaagactccttaatcaaaatgctgccagcacatgcaaataaagaatttgacaaactacagcagaggttctccaagcatggttcttggatcagcagtgatataacctaaggacttcttacaaacccaagttctcaggtcccactccagacctactgaatcagaaactcagggtggggagcagcaatccatgttttaacaaatcctaaggtgattctgatgagcactgaactacagaacacggaatggaacattcagcattctataagatttcttaaaactgatgcatatctaatgtcaatgaagaatgatatgaaccttaagtaaaactgatgtgctaaagtaggacacatgaggccaagtcaatcataaaattctcaaatgacttccaaagaagaaaaaggttgagaaccttcaaactgtgagaaggccaaataagtatccttaagacaaaactttattatccacttaaataatactgccaatttttaaatcaatatgcccaataaatcatgtacagtatttcttattgcagccactaacaaaaatgaaaacaaacaaaaactgaaataaactagaccacttctgaatccttcagatgttttaatgttcagttaagtaaaacaaactcgactattccttcttgaaaagcgtaatggtaactggacaactatcatatataccacatacgcatacaacctataaaaattcccacaagcgcaaaatgactggttcttgcccagaattacataattatacactgttaaaaaaagactaacatttgagaccatttcattcaactctattattttataaattagggaactgagggccaaaatattcatgtggacagttggctactggcagaactaaaaccagaggctgggcttcctgacctccagcccagagagctctcaatctaccagcctgcctcagccaagctttaactcaaaaaaaacagaacacatggcctgatgatacttcagcaagtcccaaaacacctctggaattaatcgaaacttaaaaccaaaagaagagtattatttagctacattaaagaattgatatgatgagaaatcatgacccgacaaattgaatacgagacagaaccctgtaatctgcatagctccagccacaaaagacagtatctgtttctaccataattaaattctgtactacgtaatgaaaagctgaatcaattactgagtaatttaaacagacaatcatatcaattagtacctatttagtcacaagttgtttctgactgtcagttacttcagtgaggatgatgatacagatgacattcatccctctgcacactcaccaagcacctgctgtgtgtctccatgcactgggatactgcagtaagtaaaccatacagcaaggcaaccactctcctgaggattactgaccaacaagaggcagggtgacaagtaccatggagacagttaaaatagtgtaatggaataggtgactagagaggaatggagactgctgaagattgctctgaggaggtgacatttaatatgaaacctgaagaaaaaaaaaaatctgaaggtctggaaaagaagattaccaacagacgggaccacaaatacaaaggcctaaggagatcatgcactttcatgctcaggcagagtagcggaagcaaggctaccaaggggaggaggggtaggagataaggctgagcatgaaggcctaggagggcattcagatttcattctaagtgcaatgggaaacccctggaaggttttaaataggagcatgacagggtctaattacatatgaatacaacaaaatcattacaaattttcaatagcctctgagtttattactccagccactaacattccctgaattaacaatatacaagcctacggctaaccttgtgggaccaaagaagtcagaaggcttaatttaaaatatttccaaagcataatatgagcaaatatgctaaagaatgactcaaaatctataccacatcatcaagctataaacattaatcaataaactaacagttactccacagactaaattattctatctcctggatacttagcctgtatactaccttagaatagcagtaatagaagttttacaaggtgttttttggagctctactttcatttaaaaaaaccctctaaagaataaacttaatttgaacacacgcttgtattatttctaaaaatatgtaatcttacacttaaatagctatgtctctgagcaaaacaacagcaaggccctgatggaataagcacggtatacaataagtcagagggagttcagaataatgaatttattcctaccaaaagaataaataatgaatttactcttaccattctcctcatcacatcttcactgccggttcaacagaagctatttcctaattaaactaaaggctatatttagtcttccagattattctctttaagttagcccctctaagtataaaatgatttttaaaaacaacatagcacccaaaatttactggctgcccagtctgcccttcaagtcaatgatttccagcgctgtctttttaactgccaaggttcctcaactattccctcaaaaaaagtctcctgtatcacaatggtctaggaggtgctgggaagaatatcaaaggtaatacattaaaaagagttcaatctaacaaaataatgacaatagaatgcagtaaatataataacagaagttatggctaagtcctccaagttagggattgattaattctttacatagaaaactggctgattcactctctccttgtcatatggtatgacatggagattccaacaagtgacatcacctagatttaggcaactcttgggaaattgacagttattgaggatttttcagcagggtagtaacacgaatgattggagtaattttaaagtaataacctatgacattatggcattatggaaatagattggagaaggcagacatgatatgcaggacaccaatgagaagggtgttttaatgtgagagacaaaaacaacgagcactttaacaaaaatattctaaaagagagtccttactggttgggggaaggggatgagtcctttctaaaacagaaatctattacaagtgatatccaaatatagacagtgacggaaaaggtaaagtcaaaaatggatcacagacttaaaactacagagcttctagaagaaaactcaagaaaaatctttgtgactttacagtaggcaaaaaacacctcacaaattaggctttaaaaaaattttaacttctgcttttcaaaacaacaccctttagataatatgtaagaaatatataataaaatatataatataaataagaatataagaaaccacagaataggataaaatatttttcaatacatacatatacctaacaaggactaatatccagcatataaaaagaactttcacaactcaataacaacccaataagaaaaatgggcaaaagatctaaactcacatctcataaatgaagatatctgaatggcacatggaaagatgctcaaaatcattcaccatcaaagaaatgcaaatttaagctacaataagataccactacaagctcattagaatggctcaaatttaaaagattaacaccaaatactgcagagaatgtagagcatttggaactttcaaacactgctagtgaaaatgcaaaatggtataaacactttggaaaatggtttggcagtttcctttaaaattaaacgaacatctaccattgggttgctaaatatttaccccccaaaaatgaaaacatgttcacagaaactcttgtaacaccaatgttcataacacattgttcatattagccaaaaactagaaatagcccaagtgtccatcaataggagaatgactaaacaaactgtcatgtattcatacaatacaataccagtcagcaggctgggcatggtggctcacgcctgtaatcccaacactttgggaggcggaggcaggtggatcacaaggtcaggatattgagaccatcccggccaacatggtgaaaccccgtctctactaaaaatacaaaaattagccgggtgtggtggcgggtacctgtaatcccagctacttgggaggctgaggcaggagaatcacttgaacccaggaggcagaggttgcaatgagctgagatcacaccactgcacttcagcctgggccacagagtgagactccgtcccagaaaaaaaaaaaaaaaacactcagcaataaaaaggaatgaactactgaatacaacatgggtgaatctcaaagtcattctactgagtacaagtgagcagatgcaaaaagagtaagtgatggctcaattttgtatgtcaacttggctaagatacagtaggtgttgctgtgaaaatattttataaatgtgattaactacactcagttgactttaagtagacttccctctataatgtgggtgggcctaatctaatcagtcgacggcaataagaacaaaaaacagatttcccagaggaagaggaattctgactcaatacactaacatagaaatcctgtctacatttccagcctgccctacagattttagactcaaaattacaacatcaattcctgtctgagtttccagcttgctggccagccctacaaacttcaaactcaagactgtagcacagaatcttaacatgagtttccagcctgtcagcttgccctaaaactgttggacttaccagttcccataagcaagccaattccttaaaataaacttctttatatatatatttttttaaatctctttatagatatatatctatgcctatgtatagacatagataggctatcttattggttctctttttctggagaaccctaatacaacattttgtatttatatgaaatttatataaattatgcaatttatacaaaattatagaaatgcaaacgaatctctagtgactaaaggtagataatgaacttggttccctaggtcaagggtagatagaggataaacattgcaaagtggcatgagaaaacttctggggatgacggaaatcttttatatcttgactgtggtggtggtttcacaggtggatataggtcaaaactgatctaattatatacttcaaatgacagtttactgtatataaattatacctcaataaattatagctaaaagtggacaactaggtgaatgatagtgtcattagtcgagataaaaaatacatgaagaatacgtgctgaagtggatttacctttagtcacactcaactgtggttctactgggacattgtggtaatgccaagaaagccaatgaatatatgagtttagacctgaaaagataaatgtgagctgaatgcaactttgggagttgtctgcacaaaagtaataagaatggctagggacagatttgatgagaacaagatagcaagtaaagaaaaggaatgtcttattagtgggctgggcgcggtggctcacgcctgaatcccagcacttcaggaggccgaggcgggtggatcacctgaggtcatgagttcaagaccaagctggtcaacatgttaaaaaccctgtctctactaaaaatacaaaaaattagccgggcgtggtggtaggcgcctataatcccagctactcaggaggctgaggcagtagaattgcttgaacccgggaggcagaggctgcagtgagctgagatggcgccactgcactccagcctggatgacagaatgagattccgtctccaagaaaaaaaagaatgctttattagtgtcccacagattctgctattgggtcttttgtgacctgaggaatgtagtttcaatagagtagtagggttggaaggtggactgaaatcagttttagaaataaaaggaaattcttttaaagtgaccatggtgattatgggttattttttttaagacattagctataaaagcaagagaaaaggaggttgataaataggaatgagaactaagaagggttttattttttgctttttttttttagaggtatttttgtttgttcccatttcatgtgctattcatttgagctgaaatattagttttgtttgtacacagaaaacatttgaacacttttatagccagaaagaatgagcccacaatgttggcaggttgacaccacaaaaggaaaggataaggtttctaaacgaaagtcaagaacacagatgaaattgttaccttaaataatcatctcaatgggttctacaaattcttaagacagctttcaaatttactgcaattttaagtgtgtatataatgcctcttttaaaagaagggatgggaatcattatgatattagctcagtcaagggcaaaggaagacttactaaatgacctctatgtcaaaacctttcacagttatcatcacatttagacatcacaactttgcaatccatttgtagaagaaaaacgaaaggctcagagaggtcaagtgaccttcccaaggtcaaaaacccaattggcagctgacaaaggctcaaaatgaagctgatctgacttcagtctccttgcacttccccatgccatgctacgtgtctaacaatctggaagtatcacagaggagcaaaaatagctgaattcagctgcagtgaacagtatcaggaaagaagagaaaaaaactgtccgggaccacatattatacctggccttaaatctatccaagctaaccagattttggacaacagaccaatgaaggagccaatgaatcagtacatatatcacaagaaggctgctacacagactgaatgtttgtgcccccacccacaaaaaaacatgtattaaaatactaacccctaatgtgacggtgttagaagtgagacctttgggtggtgatgatgttgtgagggcaaagcactcatgaatgagattagtgacctcataaaagcagccccagagagctgccttgcctttcctgccaggtgagtacacagtgagaagatggccaactataagccaggaaacaggcctccatcaacaaggaatctgccggcaacttgatcttggacttcccagcctccaggattgtgagaaatcaattatgttgtttataaaaccacacattctatgatattttataatggcagcctaaacgaactaagacagggttgtgtcattttctaccaaattcacagcaacatcagcaatggcttttcaaatttcagttatttgagcttcctcaacatttagggtggagatacactacattttggttaacaacaaacaaacagaacccatccccctcaccccaaaaataattttatttaggaaattaacctccctaaaaatctggcatgttttggaggcaaagaagtatgaataaagaaaacacacaaacgaacaacaaggaaactttccatgtagccaaagttctcacaacacccatctctgaaatgcactactttatctcagggagacaagtaaggtaaactatatcaaggccatagggaagctccaaaaaaaatcatgaagtacaaagttcaaacaacattacaggttttgaagggctttgacaacgttccaccttctacctatggagacttgtagctaacacaaatgtcccattatactgcttgatgttttccagcagctaaaacctgtgaaacatgttaaaaagaaaaaaattaagtggggtggggatcttagagtagatccaattcagcagtaccacagaaactaaagtttaaataaggagactctcaaaactccagcagcctagggttcccagcatgacaaaatccaagcctttttcattcctgttgcttcccacattcatctcttccctttggcttccaagaacatcacatactgcttacaaccttgactgggcctcagcataccataaaggtccattgtactcaattttagagttttttttgggggggtgggagaggaattcttttttgagcagttctaactatatataaggattgtattttgttacttgtttttttcttggacaccttccaaagaacaaaaagaaagagaaaatctttttttttttttttttttgagaaagagtcttgcttagtagcccaggctggagtgcagtggcacaatctcagctcactgtaacctccacctgccaggttcaagccattctcatccctcagccccccaagtagctggtactacaggcatgtgccactacgcccagctaatttttttatttttagtaaaaatgggggtctcaccatgttggccaggctggccttgaactcctgacctcatgcgatccacccacatcggcctccccaagtactgagattacaggcatgagccagcatgcccaatttaaatttaattattttttaaaaacaataaaattcactatctttcaagccagatgggtctactggagcatttcatcaacccaagatatgttatgggatcctagtgatctcgcttttcctgtatcttaaaacactttatttcatcaccctaagaattatttcactattacacatcaattattgccaattatgcttaaaaaaaataaagaaaacagaacagaaaaatggaatcctattttccatgatacgatataatgatgaaataaattattactattatattatcatcctttagttttcttattgcattacccacaacattacataaccttccagaagagtttcagactaaacatactaactttatagtctgcttttagctttcactgaacacagttgagaattcagaatttttcattttctgcccacaatggcaaagagaagtgacaaatggagacacagcacagttacgtcagaagatgaatgcaaagagacagatgacagcactctagcatcagattctgatgaaaggagaagaagacagaagaaagaagaagaagaaactgatcatacaggctgaatgtccctaatacagaaatctgaagtgctcccaaatctgaaactttttgagtgccaataagatgccagaagcaggcaatggacattgttaacactgcagaagaagtgcttattgatgactggtgaaaatggctgatgggcttactgaaggcctagagtagtgtgcattcttaacagaagaaggtatcaatcatatcaatttttaaaatcaaagagagatgtctaagatcaaaaccagtgttaacgacgcagatgactctagaggaaacatttttagaagccaaccagcagaaagcctcctcataactagaggacccacttcctggtccctcaactgcttctgatgtttcttctctcctaaaaaagctcagtgtgcactaaccttttaatcaaaacacaacatcatcagtgtacggatgggtgaatttttaaacaaaaacacagcattataggtggagactaaaaacctgccattgttcattggggctgttgtttaacagatggtacaggtaattctgttgatgcttttctgcttacaggcttagttaccatgaacacattattttttcactgtattaatggtatgtcatatttctcactgttaagaactcatgtgtgaataagtataagaaaatgattgcttaatggtagcatatacattcaaagtcaggaacaatggtgatgccaaaccacctcagatgatccacatggatggctgagatagtgacaactttgctttctttttttttttttttttttgagacagtctcactctgtcgcccaggctggagggcaatggcgcaatctcggctcactgcaacctccacctcccgggttcaagcgattttcctgcctcagcctcccaagtagctgggattacaggtgtgcgccaccatgcccagttcatttttgtatttttagtatagataggtttacaccatgttggctggtctcaaactcctgacctcaggtgatccacccacctcggcctcccaaagtgttgggattacaggcgtgagccaccgcgcccagaccatctttgctttctaaaggttcaatgtatataccatctttgtttcatgcacaaaattattttaaaatattatataaaattaccttcagactatgtgtataaggtgtataggaaacataaatgaactttgtgttcagacttggatcctatccccaagatatcttattatgtatatgcaaatattccccaccccccccaaaaaaattccaaaatccaaaacacttccggttccaaacattttggaaatggaatattcaatctgtgtaagcgaaatccaaactatgaatctttaatgaagacatcctacatggattttctcaaattcaagaaccgatgcatcaccaatatatttctaaatgcaaaaagaatgtatggtgttctcatccaaaaagttattcaacagaaaggactacatggtgcaatattctacaataagaatttgaaccataccattttgctaaaatggcctgtaacaaaacttcatatggttgttactggattgcaagttgacacatgttaaccagagtaggccgggcacggtggctcacacctggaatcccagcactttgggaggccaaggcaggtggatcacctgaggtcaggagcttgagacaagcctggccaacaaggtgaaaccccatatctactaaaaatacaaaattagccaggtgtggtggtgcatgcctgtaatcccagctacctgggaggctgaggcaggagaatcgcttgaaaccaggaggcggaggttgcaatgagccaagatcatgccagtgcactccagcctgggtgacaaaagtgaagctccatctcaaaaataaataaataaaaataaaataaaaataaaaagactagtaggaaatacatgatttggaaataaaaaatattcactagattgatgatgctaattggctttttacaaacctaggaagaaaaatatgttgcaaacatggaggaaagatgatggcctccttcaacagaactatgagttgtccaagatttcacaaagttcttcaagcatggcatttgatgatgtaagtacaagaagaacaaaaagtaatgataaggtagaacttattagagatgtatttgaaatatggaatcagtattaataagatggaaatgttctagattcacgtataacagttgatgaacagttagctgcattttagcacattactcatttggaatacatcatggaagaagaatttgggtatactatgcttaaattcttattaaagtattctaataaagctgttctccctatccttttattgttctgtacattatttgtaaagtgaaaactgcacaaacattacaaaagagccattggatccagacaacaaacagtaatggcctatttttcctggtatatgaaagacagagcatcttggtgacatttctgtgaatgtttaaaaaaaagatgcattttagaaacaaagaatacatcctttgaatcctcgcatgattacacaagagtttgtttaaagttgtttatcctccctccccacagcaatcacatctagttattctactcatttcaaaatcagaaatcatcttttttcacttggtcaatactttttctaaaataaaacgcttcaaaacagcctggcagaaaccagggattacataaaatcctctttaagaacattcctacctctggacttctgattccacaatactaaaaggcttagtcaagatttacatctaatgttccactaaaattcaaatatatttctgatctacaatttctaatcacacttgactttgtttctttcagttaaataatctctgaaagtttgatacagaatgctaagcgaatgagcagttcttaataatttctagatatcagagttattcttttaaggacttagtctatctttattattagcaatcatttatagatgatatattaaactttcaatagtttatttctaattcaaccttgatgatcaatgaggatagcagccatcactaacagactgtcatccccaccatcaccccagagaatacagcatataaatcattttcttgatacctataaactaaaattataattctgatagctaaaagcttactaaggcataaattgtttgcttttatcctaataaaacccagtttccggtatttgctctctctagtctttttttcccccatctcctttttcattgttaggtaatcatataatttctcctccccacctacataatggtttgattattgtcactgagaatgcctagagcagcctcttttccacttgcatgtttctaatataaccacgtaactaagctcagcagaattatatttaaagataataaaatttgatctgggtaaggtttagtgacttccaatttaggacagagaattttccaacttattttctcatttttgcctgtattacagataggtatggttgttaaagaaacttttgttgtactgtttctgttgtttacagagtaatgtaatttttaaacttatattccagagagatataaaatagcctcctccatcgtcagccaatgatatcactgttgagctgttttcaataaaagttcatgctgtacttcctgcctcacaggtcatgtctggttccgtttttggatcctctccactgtattcaatccctttggttctcaaggtgactactgactgatcaggggcttgaaaaaagggagacaatattgatttttaatttgtttttgtttttctctaatcatagcagctgaaatttttcatccaagctgtggcctctttgactactacattgcagttctcaaacttttaactttagacttctctggatagtttctaagatataaattaaattcagtgtcaatgaaaacaaacttacaaaacaggccttcttggcaacacccctctccccagatatagaggtgctaatggattctcatcctctcctaggagccctaagatgacttgagcctcacgtcaactctctttgctacagttaagtcaattctcttttcttagttatctaagtgccagccaaatactgcatcttagcatttttcattccaaaccactttgtggatgaagagggccacactgaaatgggccactccctgaactgattggttttctgctattgtactctatttaaccagataggaaaaaataaaacagcacaatttctctaacacaaaagcagtacagtctatattctcccccatgcctccaaacacacatgccaccagattcaaacagctgttacccacttacctatttagaaatgcaatcaaatataaatattttcagagacagatcaattcttgcattctaaaactctgtggcaacagtaattcttatgagtcattacctaagatttcacgcctatgccacaggcaagtcatgctccaaactgttcaatcatttcatttaaagcgctcaaaaactgaattgggttttgccatatatgggccgtaacttttcatgtacggaagaatggatcaaatccaacagaaaactgcaaatgattttctctctagttttatacagtaatgggtttattctcccaaattctaggactttctcaagtggttgcaggaattgcggttttggctctcttaagccaatgtaagcacatttcccactgttcattaactgagagaaggccaaataacattgtggcacttttgaaaagctgaaggaatctcggttttagtggtctcctttgaaattatgtattttaaccttccccattcctgttggaaaattaattttcctgatctgatattgtctcctttccatatactgagatatcataatactatgatttagggcctgataccgagttaaatgctcaaagcgagatatttttcatttgctgtatccactcactgccaccccctccaccatttcttgtaatccaaggatctggcaggagagtggctggcaggagctagaatttaatctgtggatggcagttaattataaaataacaggtcccagcttgtttctactttccacccccaagaacatttataaatctatacatctgtagacagtttatctttcaaaaacttctcattttaaatttgttaccctcacataactcttaagagttagtgattggtaactcgattttagagatgaagtctttggtgttgaagtaaaagagattcaatatttaacacccttatttttccagcccaagttcaaaaccagtaagacaggaaagccagaaagaaaaatatatatttatctgatatataatatacagctgatatattatatagagtgatatacacagataatagctttattactaataaagcgtaggttggaaaaggtagcttagctctattagttgagtggtcttggctaatatttcaccccagaattaggccagtttctctacctagtcacaggtgcagctcaccaggcagaggcctccctgaggaggactgcccctataaaactcacagcgtgaacaagcacagcagaatgcaagatctgtaggaaaggaatgagctgaaactagacaggcccagttcctttttccaaactcgaagataagtcacttctcctcccctagggaagactaaagtgagggagttactagagaggccaggagtattatcccagtgaatgcccatcccatacaagcatgcaaacacgaaaccagaagaaagaaagttattccccaaaatgcagcaccaaggaacctcaagttgcccccaaagccaggctgacattccccagttcccacacgttgaacttgctgactgaaacagttttcctctccacctatctaaatcctattcatcttacattattatctccaattctccttttctgtacaaatatatatatattttatatatatatatatatatatatatatttttttttttttttttgagatggagtctagctctgtcgcccaggctggagcgcagtggcgcgatctcggctcactgcaagctcccccttctcgctctgtcgcccaggctggagtgcagtggcgcaatctcggctcactgcaagttccgcctcccaggttcacgccattctcctgcctcagcctcccgagtagctgggactacaggcacctgccaccacacccagctaatttttttttgtaattttagtacagacggggtttcaccatgttagccaggatggtctcaatctcctgacctcgtgatccacccgccttggcttcccatagtgctgggattacaggcgtgagccactgcgcccggccccttttctgtacaaatattttatgtcacttaccctttttgagaacacatgcatcttaaaaactacatgctttaccctgtagatctacttaagcagatacatggaagctttaatagactgcaatatgctgagaagcaacaaacagtggaagaccattaattcatcttgcagtcttcccttgggtacttcaagatatatgagcaaatggcttatagagccaataaaggtaccaatgcatgcaccaaatattagtaaagcttaacttaagcataaatacagcttgaatattttcttttcatatccaaatgtacttatttgcatacctcctattatgccagcgcccctctttggagaccaccacttcatgcaatggggagtgacattagggctgaactttaagaaagagaactctgacagtaatgagaagacagaaaaagagaatgaccagatatccaaaatgggatcgtagcatcgaacatgagaaggccatgcataagatggggtaggtccaatcaacaaaatttgaaaaaaggtcagctttggagtggtctgaaaagggagacaaaggaggagacagaattctggatgatttcacggtaacaatcctgagtgacttggaggatataatagtattaactaaaaaggaaaatgcacaagacagcaatttgagggaaggacatttagatgaagagatccttgagaaatacatgcatttaaaagacaagtgggagagaaactaatgaaggagctgaaaatggccaatgacactggaaaagaacgacgacagtaaagtgtcctagtagccaagggaagagagaaagcactttttaaaggatgagatgatcacttgtgtcaacttctgtcaataattaaaggagacaagggacaagatgacatccgtggatatggcaaatagccaataataatgaaagctagcatcacatctgctgcatgcttgtcacatgccaggcacaccacttcaagagttgtacaagtaagaacccatttcatccccaagaaccctaggacgtaagtgtgactagcatccccattttggtgctcagcctctcgagtagctgggcttacaggcatgcgccaccaggcccagctaatttttgtatttttagtagagacggggtttcaccatgttggccaggctgatctcgaactcctgacctcaggtgatccacctgccttggcctcccttgtacaagtaagaacccacttcatccccaagatgaacgttaagtgtgactagcatccccattttggttcatccccaatttcatttcatccccaagaaccataggacataagtgtgactagcatccccattttggtaaccaacaagaaaattaaatccataataaggaagaggcagaacccaaagtggatggggctgaggacaaatgaaaggtgagaaagaataatctgcctataaatgaacagaggtataagaaaacagaacagcagctgcaggtaaaaatggttttgtttgtttgtttgttttgtgtttttttggttgttgttgttttttttttttttttttttgagatggagtttcactcttgttgctcaggctagagagcaatggcttgatcttggctcactgcaacctccgcctgccgggttcaagcgattcttctcccttagcctcccaagtagctgggattataggcatgcaccaccacgcccggctaatttttgtattttcagtagagatggagtttctccatgttggtcaggctagtcttgaactgctgacctcaggtgatacacccgcctcagcctcccaaagtgctgggattacaggtgtgagccaccgcacccagcttgatttttaagacagaaactatttgagcatttaagcgtttaccaactgaagagacagaatctaggtctgccccatagaaaaaaaaatctctggtgctactgggaaaagtcacgaagacagaggtatgatgtcaaagagtccagaaagtagacagagaaagaaatacagtagagaatagcatagtgtcaccaaacaatagtgtcacagcaccatggactgactgactctgacagtgagaaaactaaaaaagagggactgagaaagagtaagatctgagaggaatcagacagaaatagtagctgtgtagcagtctcggagttccttccatcccaaaacaagggtgcgatgagcgacagcagttcagtacaggctgcaaaaggctgaatgaggtgttcgcatgacttgctgcacgggagactagaaaacctggcaaaaggtagagtccagggctgaagacagcagatgtccagggcctactcaacctataggaaaagcactgggtgatcttcccctgctttttggtagcgccctgcttcctcccgagttccaccggaggtcagagaacacagtttcaggtttcacactatatacttatttcagaagcatgcagagttatgcagaaaaaaggacactcaaagagcagtagaacagacaagttactgcaaccactttagctgcacaggttggctacttctctacacagcttgggagctcatgcatagcccggagggagaagtgattgctagagaacaaaaaaattagtaactgagtcatacggggaaaatttctggataaaaattttaattggctaggtggatccttagactggtagactttgtggatttagctgcaaagtgtatttaaaggagtgttaaaaagtaacaactgttgttttagatattttacaatttatatttctaggataaaaacactaagaactcttttccataaacacctctattgcaaccattatggtaaaattaaaaaataatcaatattttaaaatgaattatatacatgcaatagaggtatttcctttgagcaatttatatcctacttagattaatcataaaaaccaaggtcgcaaaattaaagaattgttctaatttttaaaatttaaattcaaagcataaatctacatgaaaatcacgtaaaatcaagagaacaggtagggcatggtggctcacacttgtaatcccagtactttgggaggccaaggcaggtggatcatttgaggtcaggagttcgagaccagcctggccaacatggtgaaacctcgtctctactaaaaatgcaaaaattagctgggcatggtggcacacatctgtagtcccagctacttaggaggctgagacaggagaatcgcttgaacccaggaggtggaggctgcagcaagccgagattgcgccactgcactccagcctgggtgaaactgtgagaccttctcaaaaaaaaaaaaaaaaaagataaaaaaataaaaatcaagaaaacagaagtaatttctagaaaaacactagtttcttttaaggttttttttttttaataattacagaaagattataaactgaatggaaaagacttgggttcagtgtcagccgataattatttacaggatcctaaacaatcaattccctctttaggactcaatctgttcaatacagatgagtgacgacctgaactagatacaaagtacatcaaaaccatagctttacaaatgcagacagtcaattttctagaacaaaaacaggattctatttagctgggtggtgaggaatactcatagcacttataatttattaatttaaaaatccatattaattgttattaagaataaaaaatattacttaggtttcacatactaagtaaaagctttagatcttcattaggtttaagatcatctaattataatgaggatagagtgtaggacatttttcccagtattttctaaatctgtttaaaaaatgcttacagaggaccagtgcggcagctcatgcctataatcccaacactttgagaggctgaggcaggaggactgcttcagggccaagagttcaagaccaacctggccaacatagtgagactctgtcattatttttttaaaaaaagaaaaatgcttacagaaatgtatcaaattcagtacctctacttcaaatttgtagaaggcctgttattttttctttacattactaataccatcatttctttttttttttattttttatttttttatttttatttatttttttttgagacggagtctcgctctgtcacccaggctggagcgcagtggcgcgatctcggctcactgcaagctccgcctcctgggttcacgccattctcatgcctcagcctcccaagtagctgggactacaagcgcccgccaccacatccggctaatttttttgtatttttagtagagacggggtttcaccgtgttagccaggatggtctcgatctcatgacctcgtgatctgcccgcctcggcctcccaaagtgctgggattacaggcgtgagccactgcgcccggccctaccatcatttcttaataaaccatattcttttaacaccttgcttagagaacagtaccatttaattatcaccattccttccagaatatttgaaagagatgctgcaatgcttttaagttttaacaagatttgtcgatctccagagagtctgcacatatgcagcattgttattaaaaatgccagggaagtccaggcacagtggctcatgtctgtaatcccagcactttgggaggccagggcgggcagattgcttgagctcaggagttcaagaccagtctgggcaacatggcaaaatcccatcgctacaaaaaatacaaaaaaactagctggacagtgtggtggcaggtgcctgtagtcccagctacttgggaggctgaggcaggaggatcacctgagctcagagagtcgagatggcagtgagccatgactgtgccactgcactcccgcctaggcagccctgtctaaaacaaaataaaataaaacaaaacaaaacaaaataatgccagggagacactcattccaagaggtatcactgtaaatttcatcaagttttgctaagcaggccactaataacaaacaaaaaacccaccttgtttaaatcccattttatattcacccttcctctcctcaaactctgaattcctacaaaattaaattatgtcctctagtttacaatgtggacgtggaggaagaaaactaaagaagggcaacagagagagccttgcaccaagaccacaaccactccagggggtgggattatatccattccacacaggaggaatcggaagctttgagagctgacgtaaaactggtaaacggtgaaaccaggattcaaacccaattctacctggctgccaaaaccacacattgctttccccagttcacaggctatcacagcatcagcagcaatcaaggtagaaaacctaatcgaatatcacaaaaataggaacccatctgtgatgagaaaacttacagatctcggactgcaaactgaaaatgcctacagggccaaggcaagtaatataaaatgaagggaattcaacgggactgggaacaggagaccatgtgtatgtatcatctacggaggcagctgctgcttcacttcatgcaggaatgtgggcctggtgttgccagattttgtgcttcttttcaagagacactggaaataatcttattatttcatactgacaattaatttttaaaaattaaacacaccactgatcaaacaatataaatctgtagaccactagtatccatcccttagaactgccagttttcaacctccagtattctgggggcactactatcatttctaatagaaacagaaatacaaagacaagtatggaacccaaggggcaaagagacacaggtctgagaacagccggaagattataaaaactagatgaatcatatccatttaagccaagatgaaattagtcactaactatatatttcattcccagggttttagttttctatttcccaaagaaagagcaaggctgcaaaagagaagattgggttgggggaggggaggaacaatatagctaatgatgaaatgatacataaatggtaagatgattttaatgctcaggcaaaacccgctcttaactgagtcagtcaaccaccagttacagaaacttgaagatatcactaattctgaacaagattaatttgggtgggtagaattagtcatttcgttattagtccttaattttagccatcaaagcatagccaagggaaagtaagcatatcagtgtggttacatttcaagcaagatcttgaaattaagacaaatatttagtatgttcaagagattttgacaaatattacttaagccaaagacacaaatgagaacatactcaatatagctaactcttcccatctctctatgcatcctctgtctgttgcatttccaaagaaatatctttgtgaataaattcagaaacattttagctgcaaacacaacagaatctccaaaagtacacactgacctaaggctgaaaagagttttcatttaacaggtgagtggagatttttttaagctatggaaatgattacattttttaaacattttcccaaactttttgaggttgcaagacaattatttttacctgtgttttttctgcagcagtcttctcactgaatgacagggccatctgatacactccataccattataggcatgcaaacccttgatacggatcccaccacatagtactaaatcaccctctgtcatatttatgtaattttttaaagtagctacaagttgtcttaaggactgttctctctatcctatgtacttcccacaaagcagactcacaaattcaacaaatcaacatttccatataaatcttgtttttgactccagaacatcacagtcggctctgtaaacattacacaggaattaaacacaaaattttcctttttccttagtttagaaagacttggattcaacaagagcctccattctccccttattgcaatcaccatgtgaaaagaaggtaatttgcatttggttcattatccttaaaaggaagcaattttcaaagaggtggaaagatcgtttttttgttttgttttgttttgttttgtttcaactcctaaggaaatccttcactctggtggcacgggttttccacatgcaaaatgcaagtgcagtcataaactgaaattttttctgaaatggatttactagggaaagttacaaacttaacaagatgtcacatctctgcctcagaccaatccactcaacagtacctagttaaggtgtcagaggctctttactttagcaaaaagaagctaaattttttttatttgcttgctaattaggggtttctgtgactacccaaagatgcacaaagaaataaaggttttgcttttatctaaagaaacggagtaaggagagaatactatcataacagcatgggttgagcacgaaaggatacccatttactagatgacaaaaatcttcaccaagttacttagcttccaagttacttagtgcttttcccttatcttggaaatgtcagtttactggcctgaattaggtgtttcattttgtctttttaaaagctatgttattaatcactggaagccaaaatgatttactttggtaaaggtaccctataggggtaagaaaaaaaagttacaattacaattttaccatccaaagtgcaacaacttttcttagaatagggaaaaagatttctactctctgctaataataaactttaaatgtatattttttagagcacttggagaaaaaggcattttacatttgcagaagctccgctcatggggtcgaaatgcatgctgcctctaccacactataaccgacgagcttttatttaaaagtgtccctaaactagaactttccacagctgaaaactaattgaacatatttctttcaaatccgaacacaccagtgaaaaaggccttgctcacgaaaacaaacaccttaagggcccagagccaaatgggcaagatgaaaacgtttttgcaggaaatattcacaggttgagttgttcacacaggtctgcaagcaggtgaaagagcaagccgcaaaaagagctgcaaaactggaaaacagcacaagggtggcccaaggtaagcaagcaccaaggcaaccaggtattctgtgccagctgaggaccacaggtgtcttgctaaagaatttagagaagaaaaactacatgtgtttatagctttatatttaagctataatagacagagtctacctctaccagcacactgccagtttcagaagtcagcgacgtcagaaaaggagtgaaggttagccctgaaagaacagaaaagcagcaaacttttcagaagttaaaatggggacaccccatacaaatgggtagaagtatcccagtatggcctgcactacaaagagaaaaattaaaacacacctttttcaaaacctcaaagaaaactccaagccttatttgaaacacagaaggacatcagtacaacattactaacaaatctctaacagtcagcaagaaatgaaataaaaactaattaaattcacacttgagttttatctcactcaaacaagaactgtttcagaggcactaaatacatcggcccattactggtttgcttcatgtaggtttctgtttgtttcagtagtcgttctataaactaataagagattatgtattgaggccttgtcttcctgtaaagtataaactggcacctacctactgcagtattttgcatacaatgttgacgtctgtacaaataatgacattttgcttgaaaaccaagttttaacgttaaggataccccttgtccactcaagtctctcttttatgtatcatattacactcatcaaaaattagcatctcccatcacctctagagacaaaagtctcaatcgtatgtacatgcaccgcagtgagtatggcagacattgctggaggctcattctacacttctcttcttgatcaaaccccacttttgttgaagtatctacctgtcctgcaaatagccatgtgcttcaggagaaagtcaaccctgcccctaactccaacaaagagattctcatttctaaaccaatcatggtaactggttcagaatgggtatattacaattcctcccactgatacgtgggaaacctaactgggggctttggggaatttttcttaagaaaaagtatccgtttcttcctatccccctcttctctagactgtcgtttccaaaagtgttatgtagaaccgccgcagcagcatatggccaagagcgaagcctgcctgagagcaaaccgccaagtcaaggatagcagagctcagagagaaaaaactaaagtccttaaggacatcaatgagttcctcatcataccacatattgtctagatcccaaccacttctggattctcaatgttgtgaaataataatcccctgattatttaagcttctttgattcaggctgtccattacttgcagacgatggcatgctaaatgtgtgggcctcctctccttctgggcacatggcaggactatccttcctagctccctggtggctgggtaggccatgccacttctgccaagtgagctgaagccctctagaactttcttttccctttggtagccagcagcattccggatagtgtttactccatcagcctggctccctgagtggataatgatgtatacacgaagcttccctctccctccatgatgattaacacaacatgagcagaaaataaacctttattatttcaagccactaaagttacttgggaatcatgagctagtgtagcatgttctaacacattttattaaaaaaaaaaatgaatgagtcaaagaaagaaaaaaatcattaatctgtgttctcacttggcacaaattgaaggggggggggaacaaaaatattctcacaaatcatgtttctttttgccttaacaagacataaagaaatggcaaaaagaataatttgctaagggaaagtaagaaaagagaactgcccccagaagaatgaataataccttctaagaaacccccaatagaaactgcccagttcaagcaaacaaaaaatagatacaaactatcttaccagcacaaaataaagcaattttctatctgtcttagtctgtttgggctgctataacaaagtaccataaactgagcagtttataaacaacagaaatgtatttctcacagttctggaggctgggaagtccaagatcaaggcaccagtagatttgatgtctggtgagggtcagattcctagctcatagctggcaccttctcactgcatcctcacagggtggaagaagaatagtctctctcaggcgtcttttataagggcactaatcctattcatgaaggctttgctctcatgacctaatcacccccaaaaaggtccccacctcctaaaactatcaccttggagtttaggatttcaacatatgaattgcacagggacacacatacactcacaccacggcactatctaaactttgccctctttctccataggaatcattagaggggaaggagttacttattgagaaaactggtattggtaagaacctaaagaaaggaaaagaatgagccaatgggttgacagagcatgacaggatcaggttttggacgtccgggctagttacagaagtgcttttcaactttcacgtatctgcacagaatgaaaggattataatgatcatctatctatccaggggacaacaaagaaagaaacataaaatgtctaaacctctacttcctacaaaaaacatcagctaatttcactatgtcagttacttcaaaatgctgttgtctagctggctaactcaaagacaaaaatctgtcaatgtcaagaagcctactgtggtcctggagacacatattagaaatcctagaaagactacagtcacttttttttcagagacagggtattgctatgctgcccaggccttgatctcctgggctcaagcaatcctcccacctcacccttccaagtagctgggactacaggtatgtaccaccaggtgtagctgactatggcaattcctactttctattaaacattacagaaatgtaacgccgtgaacattacatcctcaatcctatttcttctctcttaatttatatgtggaatctggtatgttgtatatatcattgttacccttatagcaaattacagggggaatgacttccattacgttttgatacaatagctaagcagccctcccttctgatatttccctcaggggtctggagaggcctacttttgatactgtggatccaaagtacacgaagctttctcaaacaccttctagtcctttccatgatgctccccaaagcaaaaacaccttgctctctcagcgttaactgcaaaatgcaatcttcttgttcctcttaacggaaagcctctgaaagccaaacacattttattacactgaaactggcagagaaacagtttgggaggggaaaaaaagtatgaagactgcagcctctacacctctagaagagtggccaacttgcagacaggtgccctgcacagattcctgtgcacacacagacatgccctactgctaccccaacattcatacccaacaactgcctagtcttgtctccaagcacagtgtgccagactgacaagacaggtgatggggaatgcctgttgcacaaagatgaaaagaattccacagcagaacagaacagctgagcaagtaattcaggcacaactgagaggccagaatctaagacaaagtacaatggcaacttccttggagaaggtaagatggtaaagcagttcagaagaacagctgaagtgtttaagacaagcagggtgggaactacaagctgaagggctagttacatgggtgtaacaaaatgctttcaccacacagcctttattgacaatcaggaataggtgacagctcaagaaaataaccaacccaactccaaaagggctgacttcaaggaaaagcaatagcctcaatctcacaggatcaaaaattactatggtttctctttctttggcccatagtaagaaatcttacaaaacagtcaatttcattaattgaacttgcagagaaataaactgcaaactttaaaaagtcataatcttagggaaattatacttttattagcctaatttgttggaaggtacatcaacaatagtaacatgttatatcctgaaaaggaagggtgaagcccatcctagagtgggcagcatggacagggcatgctcctgtctcaatgtttagtaactaatgaatttctaaagtcccactatttagtagagcacctgaatgcagctacacacatctacagtgacctgattaaatttttaggaaggcagtgaacagaaacatctgctagggaacaggaccagatgccagcaatgcatgcaaagtgcctgtgcaacttatgggacattgctgggtgcaacaaatgatagttattatattactattataaaaacaagccttcagttattttcctctaatcaaactctatatataaaccatattgtaaaagtcttcttaagtgacttatataaactcagttgattaaatcagaaaagagcacattaaaatgataaatcatatagaatactgtgaactaaaaacattttttgtcatcagcttcccatattaaaaaagagaactttacctaagaaaacatccttaaccataataaaatgtgcagcatatcctcatgcccacctcactaaaaaacaaaacagaaaaagctctgcactatttctctcaatgcaaactactgatattcagttcttcatccttattctattacctggtttcctatgcatctagtcaagggttccacatgtcagaattcttcttgtcataacccttaaacagctatttttctttgtttataatttttaaatgtatgtcacagtagtaatatggcacaacacacaactacactctccacttttatttagttttcatccagttattcacacttattgtctactgaagatttttcagggatttgacaagctgtttgattttttgttgttgtttttaactgcatggtcagcttcaataaggatctactgagacagtaagagagcagacacttgaaatgatcccaaaagttttgaaaaagatattgaacatgtaacaagagtggaatctaaccttgaccatcccctgataatgtattcattcaaagcaaacaaaacgcaacaagatcaagcttcccttgggttacagaactactattaaccaagagaacatcctggcaattcaaaattggtgccatgctattctcaagaatccatctacactcatctttatctattttctaccacactggcctctcgaaacaaaacaaaatcattctagttcccctctttatctgcatatctatttgaaaagactggagatataacaacaattcagcgtctgttgtaaaaggtcgcatactctaaaccaaacctaaataatacttacttttaaagaccatgcagaagagaaaagcattccttagcctctttatcttcctgtttagattttaaaatgtttagatgtttgcttgaacaccctgcttctctgtgtcaactcccaacttactactaacacaaccttaagagctattctttactgggtgggggcgcggggggcctggacaggcacagtgctcatgcctgtggtcccagctactcaggaggctaaagcgagaagactgcctgagcccaagtgtttaaggctgcagggaggcatgttcatgccactgcactccagcctgggcaacagagcaagaccttgtctctaaaaaagaaaacacaaaatttaaaaataaaaatctttttaaatcctttaaaatacattcactgtaaggaataaattcctttggagcacattaccattccaatgccccctaccctcatatgacctgaaaagctttttctgagtattttagtactacttgtaaatagatgtcagaagaagacatattttctgttaacaggagttatcaatccactgagtcacttaagaccctcctttatagctatgttcctgagtgtgctttttgtttggtgttttgtttttaaggggcagagcaggaaatggaggaggggaaagacccacatagtcctttgccttccctcatctttcccctccccctccatccaccccaaatgactgtgagaacttcctgcagtgagaacaccatgaatagggcctggcatccagacaggaaagatagtgcaggactaggaatgccctgaataaagcttctatgcagccacgaaattaaagggattcaggagcgacacaaagggcctggctagttaatggattcagtcttttcttttacagtataattaggcagcatacaaatgaaagccttttccaaggagctggactggactaacaaggccaaatgactctcctctgcatgcttgccattttcccccttgagatgatgttgttcttactcttagaaaaacattgcaggaggaagttgaagtacaaattctctcctacctagaggtcaaattccgagccaccttcaagttttactcctttggacacttccatatacatcacttgttttagagacagttcggacagggaaagactacccccttcctcccacaaacattctatatgcttcacatttatttttgaaaataataattatactaggaaatgtttccagatcaattctgccaactaggcttatgaataagtagtggggaaaacctcttacacatctcagatgtgcagttctaagaatcaattcaagattcactatggatcacggacatctcagctgcagtaccgaaaaaatcaaacgtggctaacactgcttttttgttggtgttggttttttaaaatgcatctctcactttgggactttgggcacctgaggaatcagggacacctgagaaacagtatttaacgtgaacagacatgtagacaaatgaactccacaaatttctctctcttttcccactctctattgtacttgaatcctttcattttctctttaattgttccatccaggcgtttcacccaaaatggggtgacctgtcacctaaaccttaataaagcagggagttttttgaaatgcagcaagaaaaaatacattaatgaatcacagaagaaagtggagaacccagtagcttgtaaaaaaaaaaaaacaactaggaaattcaccctccctatgttaaactatagaatacagtgtttccttccacaacagcaacaagtctcacaagtagctggaaatcaggaaaaagaaaagaagggcaataaatgcaaaagacaaaaagtcaacagtccaatctgagacaagctgaatctgagcacagcttttgaaaaaaactataaaaatataagtgcggggttttgaagactgtaaaggctttttctttttctcctacgtaaaagagagtggctatattagtaatcacagagcaacaagtctgataggagtccgcaggtgccctattgtgtctgtatagagggatggagagagagggagagcagggagagacagagagagagagagattattactagacttgtctaggtgaaagcctcatgaggacatgaactacttctgtatgtatctccagtgaacacataactgcacgtaataacaacaccctttgccaaaagaaagatgaaaaatgggtgtttcaagctgatttgtgtccccctccctcataatttatatgctgaagccctaactctcagtacctcaaaatgtaactatatttggagacagggtctttagaggggtgataaggttaaaatgaggctgttagggtgggccttaacccaatctgactggtattctttttttgttttgttttgttttttgtttttgcttttgttttgaggtggagtctcgctctgtcgcccaggctggagtgcagtggcgccatcttggctcactgcaatctccgcctccggggtttaagagattctcccgtctcagcctcctgagtagctagaactacaggcatgtgccaccatacccagctaatttttatatttttagtaaagacgaggtttcaccatgttggccaggctagtctcgaactcctgacctcaagtgacccacccgcttcggcttcccaaagagggattacaggcatgagccaccgcgcccaaccctgactggtattcttataagaagaaatctggacacacaagagacaccagagatgtgcaggcacagctggaaacaccaagtgaggacaaagggagaaggtggccatctgcatgccaataggcctcaggagaaaccaaccctgccaacaccttcatcttggccttctagcctccagactgtggagaaaacgaatttctgttgtttaagccacccagtttgtggtattttgctatcacaacctgagcagaataatacaacgggaaaggcagaaactggaaagagagaaactgaaaggaagaaaaggaagaagttaaatagccagaatgttaaatgttatctcaaagtctctagaaatacatactttctcccacatacttttccatattgtagtaaattctttttgcaagtaggtatcttttttaagagtcttttttcccccactcccaggaggtttggagtttggtcatatgaggctgcaaaacttaaatttaaaaaaaaaaaaaaccttatatatacatttatttagaataccagcaagcctttgggtaaatctgaacatgtgccgaccaaataataataattatgtaaaatttcaggagtaaaaaagtaagaaagcaaaaacactagagaaaagtgtaacacctacaaatgaagacgagttatcagagttgaagtattctaaggtctttgtttttggggttttgttttaaagaaaggatgttgaagaaatggtgattatacgctttttatgtgacattttgaagttaaatatttaaaggtaaccactaaaataatgtattataaaacttccagaagaatggacagtaaaatgagaactaaagaacacactaccaagaaaagagaaaattaaaaccttaaaaggtgtgtgtgttggggggagccacaaagtcaaaagtaaacaaatccaaatataaatagattgaatccatagattctcagattaaattttaaacctgctatatgttgtttagaagaagggcaactatggcaatatagtaagaccataaaggaaaaaatatataccaagtaaacagtaacccaaaaaagctatcatcatattaatatcaagcaaaatagccactaaagcagaagtcactattagaaataaaatgtcactatataatgagaaaaagattccaccaacaagaagaatataactattccgaatttgggcggggcgtggtggctcacccctgtaatcccagcactttggtggccaaggccggcagactgcttgagcccaggagttccagaccagcctgggcaacagggcaaaaacccatctctacggaaaaactaaaaaaattagccgagtgtggtggcatatgcctgtagtcccagctactcaggaggctgaggtgggaggatcacttgagcccaggaggctgaggctgcagtgagcagtgattgtgccactgcactccagcctggatgacagagcgataccctcatctcaaaaaaaaaaaaaacaaaaaaaaccctatcctgaatttgcctgctatttatcaacatagcctcaaaatacattgaattaaagggggaatttcatgaattcacaattatggaagaaggacttcatgtatatagtactgtgaatagttgagtagtaaaactatagaagatgaatgaaatacttaacaatcacgatctaaggaacacattagacctaaccaacacccaacaattagaatgtaccttcttttcaagcagacatggaacaattataccagatcacaaagttaatctcaaccaataccaaagaatcaatatcatccaggcactttgacaattatacgataaaatctgaaatagtaaaatctgaatttacaaattctgatgtatttgaaaacatcaaaatgacctttaaaacaattcatgaaataaaagaaaaaaaatcagccaggtacagtagctcacacctgtaatcccagcactctggaaggccaaggcgagaggatcacttgagcccaggagttcaaaaccagcttaggcaacagagtgagaccccgtctctacaaaacattttttaaaaattagccaggtgtagtggcaaacacctgtcagtccacctactcaggaggctgaggtgggagaatcgcttgagcccaggagttcaaggctgcagtgacccatgactgtgcacaccagcctgaatgacacatggagaccctgttgaagaaggaagcgaaggaaggggaggggagaggagggaaggtgggagaggagggaaggtaggaaaggtaagaggaggaaagggaaagaaagacaaaaatcggctgggcgctgtggctcacacctgtaattccagcattttgggaggctgagaatcgcctgaactcaggaggtggaggttgcagtgagccaagatcattccactgcaatccaacctgggcaaaagagcgagactctgtttccacagaaaaaaaaaaaaaaaaaaaaaggaaatgaagaaagcctaaaaattagtaagctaagcacctgaccttaggaataaaatgaaagagaactcctaacaaaactaattgatggaattaaaaataagagcataaattaagtatgggagaggggaatgatagaaatttcaagaaaacctaatgctgattctttcaaaacacgaataaaagttacaaagccatggttagaccaacagtaaagagaaggaactaaaaaggagacatctgaaatgtagtagacttaaataatgctgaaaaacagacatggaatattttctagaaaagtatctcttcccaaaactgagtctagaacaattagaaaacctgaatatagctacaaccattagatacatttgaatttgtagtttaaaggctaccaggtccagaaagcttaagcaagttctaccaagcgaaaaataaatcacattgctatgcaccagcaaacttttttttagttttaatacaccatttataatagaaaaaaaaaacccacatacaatatataggaataaatctcacaacacacgcgccaggttgtggatcaaaagttgtacacaggtttacaacttaaaaaaaaaaaaatcacatctgaagcacagcaaaatgttagattcaacaaagctggtggatagttacacaggtgttctttatattactcttgtcttcaggcttgaaatggcctataatacattttttaaaagaaaaaatactgcaaagctaaaatcatttgggcaaaacaaactaaattaattgctatttaagaacatcattcaaatagtgttcatcttacaattttcaaaggcaacacgcagaaaaggaagaagaaaagcaaattgccgaagtaagtcctgactaacagcagcaggaacacaagaaagtgctaacatttgaggaaaattcactataaaaaattagttttggccgggcgtggtggctcatgcctgtaatcccagcactttgggaggccaaggagggtggatcacctgaggtcaagagttcgagaccagcctgaccaacatggagaaaccctgtctctactaaaaatacaaaattagccgggtatggtggctcatgcctatagtctcagctactcaggaggctgagaggcaggagaatcgcttgaacccgggagggggaggttgcggtgagccaagatcacgccattgcactccagcctgggcaacaagagtgaaactccgtctcaaaaaaaaaaaaattagtttttcttccatcttcctccacttatataacatatattaggcatgcatttgagtattccccttgggagcccagaaagaaatccagtggtcagcaattcagatctaacacctctgacccagtctctgacacagttcactatatactagtacagtatttggatttcaaatctttatagttttcctccagattgtaaaaattcttatcatagattcatatgtagaacactggccaacatttactaccagtaacttttttcaattcagtcactaaaagaggcaagagtaacattaagaattttaattttaatcatgaatttttcaaagatttggtttagtgattataatttcaatactgaaatggtttaaaaaatgtaaagtatttggtaaatacagaacggtggtactattaaaattactccaaaaaacctctaatttcttgcaacactatagcacatccccgtcactcaccactgcactatgtgaaggcacccacatgctctcaatgagagttctcaccacccacaaatgccactgaaggactgcttaaaattgaaacacctcacttttaatagtaccacttgttgacaatttttaacagtataaaatgagctagatttcttaatgcaatgttagtttattgattgtttggagtcattcaaactacattttcatgtaataaccactagggaataagaatttagcctatactagaacatgcaactggtaacgtgtttacttttcctgttctcttaatcatgataaactaaatattctcctggagtcaaagggtacagaacctgaccccacccacactttttatcaaaggttgtcagcagcaagtaaaggttcaggcaggcttaacatctaccaaaaaaattaaaacctcaactctaatttcaaagtatgcattagtataacaaataagattactaaaccctaaaatgcaatggtattaaaattattattgtttttaaatgatatccaaatgccaggttttaaaacattacaaaattacaccagctatacctcctaaactatcttcaagtttgtgggctctatccatgctgtacttccttcctttggacataaaccaaatggaggaattcaaactccaaattcttaggccaagaaaggaaagcctagctaatgtttaaaaatctattattaagaagcctatccctgatttacatgtgactaatgtctaagctaaacatgtgcatatctacacaaattatttataatattgtacagtgttataatagtaacataccatgattacaatcacttccagtaacacatgccagtggaggaagtagaggtgctaacatcactgaagtttcaaacatggatgtgcattacatgatctgtttatcttcctatgccttcattatcaggttgatttactggttccttttctcccttactcattcaataagaattgagcacctactatacaccaagccttctgttaggcactaaaaaaccaatatccacagtccaagggagaggcacatgagaacaaattcatgcaatgcatggagtcaggcttaagacagaggtatgaagcacagcaggaacttcagctggcactctgaccactctctgaataaacatcaattcttagacagtgaaacagctcaaataccagcttggagaaaacatgaggcaaaaaatgcattgaatttcagagacaccacacaaataaaggtaatctctgttcctctaagtcagggttcacaaacccagcaggcctctgggaccaggcaggaagcctgtatgaggagtgtgctcgcaccaggtgcgggcatgcgccctctgaaggagccccaccactcaccagaggcattgccacagaagctggggtgcccagatactctgattttttaaaacagaatttaaaaaaagaagaaatcttgattcttaagggaactttacaatgtctaactcatggcaattaactttaaagtatttccaattgtgcctaccaaacaaaacacacctgtgagccacatgtgtcccacggcaccagttttggacctctgctctaaatccagcaaaagaagatccaacttacctctccacatcaaagtagtaaacattaagcaaaactcaaaaaaattaaaaagcctatcaacatatatgtccaaaatttcaatgtaaccaccacagagatgcagtcacaaaaactcaccctgtgagaaactctacaggacaaataacctggttttttcaacaagtaaattgcaaggaaagagagggagagggggagggtggaagaggagagggaagaagagctggagaggcgggaaacctaaaattaaaagaaatttaaaagacataaaaaatgcaattactaggtttggaccacatttggatcataattcaaaccaaaaatgtaagattaatggaaatttgatcactgactaggtaattgctgaaaaataggaattagtgttaatttttaagaaaataacagtgtcatcgttttgactgaagtacttccaaaggagtatttctgtatggcgatacttaagtttagaggtatttatggatgaaatgatatgagatctaggattagtttcaaaataacctaagcagaggaaggtgattcgagataaagtaagactggccatgagttggcaactgctgatgctgggtaatgattacgtgagagttcattacattattttgcctacttttgtaattgtgtttaaattttccgtaataaaaaaaaattctaaaaaaaaaaaagctgtttttaagtttttcctattcactatcacttaatctactcaaaaatagggaaatgatgcacaggattaagacaaccaagagagggaaaaagaacagaaaataatacttcaataataactataaagaaactaattaacctgccccttaatttaaaaataattgactttgtaagtaaccctgggacctctcttgtttatggataaaaagtgtaaaaaaaaaatcctaagcaagtataatttcatttaatgtctccctaacaggacatacaaattagaatgctgtattccaactccattaaaatggaaattggtttttaaagtattaagagaacacactgaattggtgatttttaatgtcctcaatcaaacatccttgatgttcagcacagtttattatcattgggggtgagttacgggaagctggaatatacagcagggaattttatatactcattcaataagaggtactaatttttcttttctaagaaaaggaaaatgagtgtgctgggatggggcagaaacagagtaaaatagagcttccgataaaaattttaaaaggccagctgcagtggttcacacctgtaatcccaacactttgggaggccgagccaggtggatcacaaggtcaggaattcaagaccagcctgaccaacacggtgaaaccccgtctctactgaaaatacaaaaattagccaggcatggcggtgggcacctgcagtcccagctactcaggaggctgaggcaggagaatcgcttgaacccgggaggcggaagttgcagtgagccaagatagcgccactcaggcgcccagcctgggcgacagagcaagactccatctcaaaaaaaaaaaattacatgaagccagtaaaaagactatgcctttattctcagaccacacccctttgcattctgggagcatcttggggcctcagataacatagagtcaatcaatatagctgtataaggaactacacagctgtgtaggtggctaaaagatgaagaaagtcatgtacataggaagaacagaaaaagtggttgttcttgtgtgttcagattatagaaaagaccgcgttacttttatcttccttttctcttttctccctcctactgataagataaaaagttaggaaatgatagtcatggcacctgtccttgaaaaagacaaatctaaagaacatttgataactcaatggaatggtttcccattatcttaaaatcaattccaaaacactggcctcaaaggcctttgtagctagacttaacagagaattcatatatctacctattttgcattgaatttaagaggagaaaaactataatgaccaaagcattcggtcaggcagaagttagccccagaccacacacccattatatggccccttacaatttcctgatattctcaatcagtacactatattcacactggtcctccctctaagtccttaaacttgccgggcttcctacctcagggctttcaaacacactgtttccctatttgcaatgctctttcacgtaccctgtaacccaagctactattcagtcctcaggtctcagcttaaacaagaattcactgcatactagatttcttcctcgtggcacacataacaattacaattaaacaattatttataaaagtatttggtaagtttactccctactttgaagtcacaagggcaaggaccttcttgttaaagagtggcacacaagaggcacaaagttcaagaagtatttgcaagaaattgagaggaagaaccctatagtactgtcttacgttttatgataatctgcgtccttgtgcaattggcttaagcttctgaaaaggcagaggatctggtgactcatcttttcccccagccttcaaagcaccttataccttgggaagcaagcactccacatctgaattgactaagtagactcagggaaaaaaagacagtgtcccatatgaaaaaaagtttctgttaccactaatcagtgacttttgaacacaaacaaacctttgtgccaacaactgctagcccaataaatacaaagttcctgagcaagtaaaaaacaaccgaactctacagccattccaccagggcctataaaatcaagaacggtctattatttttttccactcttactgctgtttagcaattcatcatatgaagagtgagcaattatggttctttctcaagagtttctatcctagttctcaaactacctttattaaaaatctacaaaacacaactttgctacgggaatataaaatagctagatgatctgaagacatcagtaaatatttgagcaattatattcttttttttttcttctttttgagacagagtctgactctgttgcccaggctggagtgcagtggcatgatctcggctcactgcaacctccgcctcccaggttcaagcaattctcctgcctcagcttccacagtagctgggattacaaaggtgtgcaccaccacgcctggctagtttttgtatttttagtacgtatggggtctcaccatgttggccaggctggtcttgaactcctgacctcaggtgatcccctgcctcagtctcccaaagtgctgggattacaggcatgagccaccatgcccagccataattatgttcttaagaaaaactaaaataatgctcgtttttgtttcaataaccataatttaaaatcttggcatctagcccagtcctaagcacaaaatgaaaatacaatgcttactacaattaacaagatttccatgataggtttagcatggtttcttaacagtgtttattatttattaattgtcctctataccatctggtttatatctacatatctacctgaacttaaaatttaccatgtctttatgttcactttataaacagatttaatccatgagttattatgataatctaagaatggaaaatacattcttcagaatcagctcttacctgtaagtcataagaaaaaagaagtcataagaaaaaaatcaaatctatctcagaaatatccataaatgagtttataaacagaaaggaaacagaatataatagaaagcacaatcccagcttggttatttactacccgcagctttcatgaaggcttctgaacatcctgcctttctgcctcccgacctacccaccctccctcccgcccaaacacatacacacccctacagattaggagcagggaactacaagctgtgcttgctatcaaaacaaacctacccaatgcaagcattgccgaacctgtaaaaccaagtttggcaatcagctcctccacctctcctttgtccccgtttcccttccagtgcagtaaggtgctttaggatggcccaaggaaggatcaatcctccaaaaattcagcagtagttgaaatcactcatgaattcacaacagatggtatacactatgattacttggttgatgagctcgagaaaaagcatattacaataaatattgagatgtgactcttctttaccttctaattcactaagaaaactgaggccaattgagacccaaagacttccagagctcttacaagaatctctttatccatccttcctaaaagccttatggaaacagacgaccctcttcccacctagggttaactccttcatggatgctccatgcctgcttatttctttctttcctttgtttaaatttttcccctctgttcatccatcatccttagcctctttctccctctctcccttcaggatagaaatactgttcaaatttctgccttcagggcctcttctcttcttccactgagatataacttacatctaataaagcacacaaaccataagggtaccaatcaatgaactgttgtatatgtacccacccagaaaactaaaacccaaatcaatacaaagagcaatatcaagaccagacggctcctcatgtcccttcccatccatatcccgctgaaaggtaaccactacaatacgtcaccaaaaattagctttgccagctaactgaccttcatataaacataatcatagagttgtatctccttcatgtctgaattatttcactcaatataactcgctactactttttaaatataggcattcttcggagttgcttcctaaggcctttcctcactctaacaatttcattcaatccaaaggcttcaaaactactatctgtctagcattttcattcaatccaaaggcttcaaaagtactacctaaatagagatgatcctggagctcttcagacatacttgagtattcttcaggaacctcaaacttaacacatccaaattctaactcatcatctctccccttaccctaaaaccaattcctgctcgcatattctgcctgttggttaatgggattatggtcacccctaaactagaaacctccaagtcatccagacatataaaatgttgttggtctagttcacaccatatccctagttaccaacatgcaggacatacagtagtctgcacttatctgcaattttactttccacagtttcagttacccacagccaaccacagtccaaaaatagatgagtacaatacagtaagattgacagaccatattcacataacttttattacagtattgttattaactgttccattgtattagtatttattgttgttaatctcttactgtacctaatttagaaattaaactttatcataggaatatatgtataggaaaaaacatagtagagtcatcccttgctatccaagtggtactggttccaggaccaccacccaccccaaaagataccaaaatcaatggacactcaagtcccttatataaatatttgtatataacttatgcatatcctcccacatactttaaattatctctagattacttataatacttaacacaatgtaaacgctatgtaaatatccaatagttgttatactgcatttttttattattttttattgttgcattgttgctttgttttggggttttgttgtttttgagacaggtctcactttgtcgcccaggctgcagtgcagtggcaccatcacaactcactgcaggctcggcctcccaggctcaagccatcctcccacttcagcctcctgggcagctgggactacaggcatgtgccaccacatctggctaatttaagaaaaaaaaaatggtagagaaagggtctcactatgttacctaggctattattttttactgttttttttttcctgaatattttcggtctgtggttggttgaatccattaatgcagaacccatggatacagatggcctactgtatatctaatgttctacctataggtataggtactacccccagcttcaggcatccactagaggtcttggaacatacccttctcaaattaagtgggaactgctgtactcaaattagttcaggagtgaataaaaaatcctgaactgcccttcccccctccacatataatcattcattaaaacccaacaattctacattgtaaacaattatcctatgttcatggttcttcatctgcactgacctcgtgtagaccttcatctaacttctaggtcccctgccaaaaatgtcctatcccatccactccagctcctggtctactcttcctaatcctcaaaagcatctcccaccgaccctatcacaactgcagcagaggtgattacctccctttttggaatgacaaataccttgtacaaacctcacaagcagcacattccaagcagcactgcatgctttccttccctgccactaggctgaactccctgagccaagggcagcatatcattccttcgtcagctcctaacaggctgttttaacacacaaagtcaaaacatgtttatcaaaggccctactaaggcagtcttcaagtttctagttagtccctcgccaatctatcctccagctggctgcccagttaatgccaaagactacaaatctaatcatgtcattctccacttgacttgcttatcgagtcaagtccttagcatgtgaggcctttcaccacatggcctcaacctctcttttagtctcatctcctaccacttttcatctcatcacctaaaatttcaccactccaaactactcaccattccccacccacatcgagccctgtcattcatgctgcagtacctggcatgcccttttcatgcaatgctagtctctcattttctcagagaatctttcccaggaatcctttccagaggattctacttccagggagctggtatgtcagcctttctggattcccctggcactgtgtaaatgcctccaataaggcatttcaagttttattattattatttatgtaaacgtcacctcccattagataggaaaaactcaacattcaaaagacatacatcctaagagcttcataaatgtaatacatattctttttatacctcctcacttctgtctgatagccatagctagtgctagcatttattttgtatacggaaaaaaataaatggctcctagaagaaaaccaagtaaataaataatgtctatatcacttcctgagagttaccacacatatggtaaccagtagaaagtgacaaacctccactgaaatttggaagctgggtggtgagccaggcccatttaccaactaaacagatggctgcagtcagcttaacatgtattaccatttcaaactcatgcctcagcaaaaccagtccttcaatgttaaattgtaaataccaagaacagaggacacactttcattcattatgtcgccaactcctaagtagtgcctggtcctcaaggatcactgaattaatcagtgatatccgctacacaatctgttgcttcctacttttatgaactgatccacaattcttccatcacccaactgtaaacttgtcatcttggagcttctgttgccaaaagagccagttagctactgagtcccaggataatatccacatcaatctcctttactccctcccactgccctagctcaggccctcagtgtctcgcctgaaccacacagtggtttacctccttcaacttctactctctcccactcccaccatgcagatgaaactcctggggatcttgttaaaatgccgattatgcagtaagtctgaggtggggcctgagattctgcatttctaacaagctcccaggagaggctgatggtgctggtccacagaccacatttcaaggggccaaggctcaacacaatgcagtcaacaagcagaggccagctaaccatcaatcaggaatggacaagcagaggtttctatgctaggtaagaaactattagatgctctctgccccctttcggtgcaaagattccaggccatctctgggctatccatgaggttctcacccattttatacaagtgaagcctggcaaagctatactctttttttttttaattttttatgtattattattattatactttaagttttagggtacatgtgcacaatgtgcaggttagttacatatgtatacatgtgccatttaacagacattacttcacttatggcatttgtcaggttctgatttagtaactgtctacagacaaccctggtttagtctattccaatattacatacgtttctaaaagataaagaagatactgtgcatggggtaagtataattgtgcctgtgatagtaccctaaagataaatgaactgtactactttcttttacccatcatcaggattatctggaggttgatgctacctggggtaatctgtcagtttcttaaaaccaagagggtggtcaactggttttgttgttgttgttgttgttgttgttgttgttgttgttgttttgatggggggctgggaaggggaagtatgcatatctataaaagtaggaagcaatgacaccttccaattctaatggctacaagccaattcaggatataaaataagcattccaactatacaaacaagacaatccctactctcagaaatgaacttctgtgtggtatcttaagaatgacatcctcggccaggcagggtagcttatgtctataatcccagcactttgggaggccaagacaggcggattacttgaactaaggagtttgagatcagcctgggcaacatggcaaaacctcgtctctacaaacaatacaaaaattaaaattagccagattacaaaaatacaaaaatttaaaatgccaaattacaggtggcatgcacctgtagtcccagccactagggaggctgaggtggaaggatgccttgagcataggaggcagaggctgcagtgagtggaaatcgcaccactacactcccgtctaagcaacagtaccagatcctgcctcaaaaaaaagaaaaaaaaaaaaagaatgacatcctcttaagcagttccaagatgtttgtagaacttttctcatcacatattcattttgtgaattaaacaccaagtccctcacatgacttggttacaaagcaagggatcattgagcttctgcttcataatcacaagggccaataactattctcctcctgattacattggtgctaacatttctgttaacatcccccataaaaatcagcctgtcaagtgttgatattgctctaatgagttaactgaagtctctgtaaaaattttcacagagggcaaataggtgttatttaataatagatggtggaaaatacccactggcaggtaattaacctgaatgttgattggtttgaattagaagtattttatttggattagaagcatgacttattttagtcagacaggctgaaataattttttttgttaccatggtgtttctcataattataaaacacaaaaagcaaaaagcagctcattttccagtgttgtcatccacattactacaagacaatatttcacagagccactgccatctactcaagataaaaataatttataataggtcattagtaaagacaacttgccatgtgtgtagtacaggttttacagccatggataaaagagctaataagttgttttatgcttatatgaatgctgaaagattttgtttcttcctagcatagacgagaggtttttttaaaaattccttcttccatgaagatccagagaggagatacagaggtttttaaaaaatgaccccaggtcatgaccaaatcatcatcttccaatttttacatgaatgtggtgtacgtatgataccaaactaaaaaaaagtacctcccttcagaagataaacagcacttcccatcaacctcataaatccatagaaaaataaaacctcataggccttaaaaaaaagaaatacaagaatgtccctcagtgtactctaggctactgtcaggctttagtgcaacctccagcacatgcacatttgcatttttttgtttcaaaaaatcaaaacgaatatttgcttaacccagaatttagatcctcacaaactataatacaaatagagcccaaaacgattcaagtgataaaaaggcccagatgcctggaagtatttggtaaatgctaaggattcaactggaactattaatcctaaactcggtcgactgtatctggaaccaataatttagagttgctcctaaaacaattcaggatcccagaactgaagcaacagtctactcctagtccttcgagggcaacacagtggagtttggaggctctctctccccattcctgctactacagtaacctgcgaatactatgtctccattagaacacttttcacctttttattgttaatgctggcttgtttccacaaacatgccctcaaattggtaagtaattcaagggatcctagacaattcacattaatcatctttaattcaaaggatcacgatatagtaaataatcacagtaattactgattaaatgaatgaatgtgtataggcatacctcagaaatactgcaggttcagttccagaccactgttatagggcgaatatcacaataaagtcacatgaattttttggtttcctagcgcatataaaaagttatgtttacacggtatagtctattaagtttgtaacagcattacatataaagcacaatgcacacaccttaatttaaaaatactactaaaaggtactaacaatgatctgagcctttggcaagtcataatctttttgctggtgaagggtctagcctcaatgttgatggctgctgactgattcaggtggttgctgctgcagattggagtggctgtggcaatttcttgaaataagacaataaagtttgctgctcaactaactattcctttcacaaaagatttctctttgatagcactttactcacagaacttttttcaaaattggagtcaattctctcaaaccctgctgctcctttatcaactaagtttatgtaatattctaaattatttgttgtcatttcaacaatgttcacagcttcttcaccagtagtagattccttctcaagaaaccactttctttgcttgtccataagaggaaattcctcatccattcaagtttcatcatgagattgcagcaattcagtctcatctccaggctccacttctaattgtagttcttttgctatttccaacacatctgcagttacttcctccatggaagtcttgaactcctcattatcatccataaatcaacttctcctaaacccatgttaatggaggttctcctcccatgaatcacaaatgttcttaatggcatccggaatggtgaaaccttgccaaaaggttctcaatttattttgtccagatgtatcaagggaattactatctatggcagctatagccttacaaaatgtatttcttaaataataagaccagaaattcaaaattactccttgatccatggagtacagaatggatgttgtgttagcaggcatgaaaacaacattaacctctatgtacatctccctcagagctcttggatgaccaggtacattttcagtgggcagtaatattttgaaaggaatcttttctttttctgagcagtaggtctcaaaaatgggcttaaaatattaagtaaataatgctacaaacaggtgtgctgtaatccagctttgttattccactcatagagcacagacagagcagatttagcagaattctcaggggccctaggatttccaaaatggtaaatgagcatccgcttcaacttaaagtcaccagctgcattaattcctaacaagagagtcagcctatcctttgaaggaagccaggtactgacttctcctctctagctatgaaagtcctagatggcctcttctgccaatagaaggctgcttcatccatctacactgaaaatctgtcacttggtgtagctgccttcatcaatgatcttagcgagatcttccagataacttgctgcagattctacatcaggttctacacatcataacttgtgcagcttcaccttgcacctttgtattatggacacaagcttatttccttcaatctcatgaaccaacctctgctagcttcaaacttctcttttgaaacttcctcacctttctcagccttcaaaaaattaaagagagttaggaccttgctctggattagggtttggattaagtgaatgttgtacctggtttgatcttctatgtagaccactaaaacgttctccatatcagcaataaggttgttttgccttcttacaattcatgtgttcactggagtagcacttttaatttccttcaataacctcttttgcatttgcaacttggttaactgtttgtggcacaggagaactagcttttggcctttgtcagatttcaacatgccttcctttacaaagtttaatcatattcagcttttgatttaatgtgagagacttgtgactcttcctttcaattgaacacttaggcctttatagggttactaactggcccaatttcaatactgttgtgtctcagggaatagggaggccccaggagagggaaaaagatgggggaatagccagtcggtcaaggagtcaaaacacacacaactttatcaagcttgccatcttacatgggcgtggtctgtgatgccccaaaacaattacaatagtaacatcaaaaatcaccgatcacagatcaccttaacagatataacaatgaaaagggtgctcacttcggcagcatatatactaatagtggaatgatacagagaaaattagcatggtccctgtgcaaggatgacatgcaaattcatgaaacgttccctattttttttaaaaaattataaacaatgaaaagttttgaaatattgcaagactcaccaaaatatgacacagagacacaaagtgagcacatgctgttggaaaaaacgttgccaacagacttactcaacacagggttgccacaaaccttcaatttgtaagaaatgcaatatctgcaaagcacaacaaaagcaagcacaataaaacaaggtatgcctgtacagtcttccatgtaactgagcatcagtgcccaacaacagtagatcccatcttccttaatgagccctaattaactctaattaacatctgtggcaatttcccattgctaaaaataataaaaccacatgacatttgtataacattcacagtttacaaagcacttccacacgtatcatcaaatctgaatctcacaaagttcttcaaaacagttttttttttttttttttgagacaaagttttgctcattgcccaggctagagtgcaatggcacgatctcggctcactgcaacctctgcctcccgttttcataggattctcctgcctcagcctcccgagtagctgatttttttgtatttttagtagtgacagggtttcaccatgttagccagactggtctcgaactcctgacctcaggtgatccacctgcctcggcctcccaaagtgctgggattacaggcatgagccactgcacctggccgaaaacagatttttttaaaatcacctttttttttctctctctctctaataaatgaggctgaaggaggttaaggggtttactataggtctcacatcatgtaaagaagcacaaagaccagagaagggctccagtgctctttccaccccaaggaagagcagcaacagacatcccaaaatgtggagggatggtgtgtaagaactagtactgtcgtcatagacactttcattcattatcttacttgatcctctcaacaacctcgtgcagcaggtaagaaagaatgcagaaaagccgtgtcagtggcacagccagaactcaagtccaggtggtaactagtttaaagtctatgcttcacaaatgctgatgtgcccaaactgaccacagaagctcattagggatacgttttccatattcagcaaatcaagggggacacttacaagttaactctgacatgtgatgcctgaacttgaattctgcctctctcttgctcactgtccaaatctagacaagttaccaaactgctctgtaactccatttctctatctgtaatactggggtgataacctacctcatacggttgttgtgagaattaaattaatagttataaagcacttaatatttataaagcactaaacagtaattagcatacagggtgatagaaatgtttactaaataccaaaatactatataatttcttgaacattaggtagcaggatacaattgtgctgaagcagttcaattcttttgcacttgcttattcaaattttttaaaaataacatctggtttgtcattgtggaagaaagcactgttacatacaaatacctaaatgtggtgaccacagtttcatttcatttaggtttttttttttagacgaagtcttgctctgtcacccaggctggagcgcagtggcatgatctcagctcacggcaacctccacctccctggttcaagcgattctcctgcctcggcctcccgagtagctgggattacagccgcacaccaccatgcttggctaattttttgtatttttagtagggacagggtctcgaactcctgacctcaagtgatctgcccgcttcagcctcccaaagtgctgggattacaggcatgagccaccacgcccagcttcatttagtattttacagcaatgggtccggagattttctccttaagtgttcatgtattaaaaagcctatagtcaactacagcaaaggtgatttggaacttctgcaacacaactaaaagcctacagaagagaaacctagttgtccaacacacagaatcttataaagccaccaaacccaacagcagtaccatttgtgtcttgcagtcatttatataataactaagaattggtcaatagaccatgaaagcccgtttgccaaagatggcagatgttctaatttgacttttctatatttggaatgtgttccttttccctcccccattcccactaaaaaaaacacttcattttttctgggaattaactgactcaacagcactaacgtaccatgggtacgattagaacactggtcgcaggatcacagagttctatctcaagttagagctatttcaaattattattcctgtaatcaagaactgtcatcagttcaagacaacacatggaacccccttctcaggctagccaaaaaaaaaactcaaggcaccactggcagagtctactaatttcaataggcatgttagccttccttttttaaaattaaaagataaaccaggccaggcgcagtggctcatgcctgtaatcccagcactttgggaggccgaggcgggcagatcacgaagtcaggagtttgagaccagcctggctaacatggtgaaacaccgtctctactgaaaatacaaaaagtacccaggtgtagtggtgtgtacctgtaatcccagctacatgggaggctgaggcaagacaggagaatcacttgaacctgggaggcagaggttgcagtgaaccaagatcgcgccactgcactcctgcctgggtggcagagtgagacactgtctcaaaaaaaaaaaaaaaaagataaagataagccatatgtgcttcacaatgacctttaaggggtagcccccagaatttctccagaaggtgaaaaaagttcagtgaatctgaacagtataaacagctgagactgctgcctaatgcaaaataaattagtcaaagagctcaaattcagaaaacagaaatcaatgctttatgtcacttctttaaaaaaaatattttttttttttttgagtcagtctcactccattgcccaggctggagtgcagtggcaccatctcggctcactacaatttctgcctcctggactcaagtgattcttctgcctcagcctcccgagtagctgggattacagggatgcaccaccacgtccagctaatttttgtatttttagtagagacgaggtttcaccatgttggccaggctggtctcaagctcctgacatcaggtgatctgcccgcccgcctgcctcagcctcccaaagtgctaggattacacgcgtgagccaccgcacctggcctaaaaaattatctctaatacgtaaagggtgaaaaatacacatagaagcaatattttatattccagcccccctccccttcccatccaagccacttagagatgatacagaatccacaggaaaggagtatcctgataagtccatatccagaagcacataagctgccatcctaaaagtgacgatggcgtgggaaattggggcatcaaaaagaaatgcagtggtaaggctaaagagccttccctttctccctactgtccctcaacaaaccctaatacctaccctaaacttacattactccatattgtagattttaatccccagcctgccagttaaaacagacaagcaaaaatggcataaactctggagaaaagtgcttttttttttttttttttgagacagggtctcgctctgtcacccaagctggagtgcagtggcatgaccatggctcacagcagcctcgaactcctggactcaagaatatcttcccacctcagcttcccaagtagctaggactacaagcatgctaccatgcccatctaattttttttattattattattttgtagagaatgggtctcactatgttgccaaggctggtctcgaactcctcagcacaaatgattctcctgccttggcctcccaaagtgtgggaaatacaggcatgtgccacatacctgccaaaaggggcattttaaatcagtgaagaaagaacacagttattcaattaaaatgtgcgaacaatttgttatttttcctccttccctttttttttttttttttgagacagagtatcactctgtcacccaggctggagtgcaatggcttgatctcggctcactgcaaccttcacctcccaggttcaagtgattcttctgactcagcctcccgagtagctgggattacaggtgcctgccaccatgcccagctaatttttgtatttttagtagagatggggtttcaccatgttggtcaggttggtcttgaattcctggcctcaggtgatccacctacctcggcctcccaaagtgctgggattacaggtgtgagccaccgcacccggcctctccttcctatcttaaatgatgatacatcaaatttttatgcatagaaaactataaaatactggccgggcatggtgggtcacgcctgtaatcccagaactttgggaggccaaggcagatggatcacctgagctcaggagttcaagaccagcatggccaacatggcaaaaccccatctctactaaaaatacaaaagttagctgagcgtggtggcaggcgcctgtaatcccagctactcaggaggctgaggcaggagaatcgcatgaacccgggaggcagaggttgtagtgagccgagatcacaccactgcactccagcctgggtgacagagcaagactccataaaaaaaaaaaaaaaaaaaaagaacagaacagaacagaaaaggaaagaaaagaaaagaaaatgataaaatactacaagtactagaaaatttttaaaatcctggagtagaagagatattcctaagcatgacacagaccctgaaaacctagaggaaaagactgatataaaagtgaacagataaagaaaatataagtgacttagtaaacaaaactagcttctctatgtaactcccaaagaaattagtaagaaaaaagcaaacatccaacccccccaaaaaaaaaaagcaggcaagggatatgaacaagtcacaatgagttaccaattaatgttcaacaaaattaactgcaaatttttttaaattgagatttttttccccaggatcagttaccctactcaccccctcccatccataaatacaactactacctctcatcatatcctacctccacactcaatggagaacatgcgtgtgtgtgtgtgtgtgtgtatatacacatacatatatatagtgtgtgtgtgcataaggaagaataagtttgccaactatagcagtgtttatacacgagagttccttgttacttaaaactgaatgtcagctgcaccccagccataccacctctctaagagaccatcaagagaaatttttcctctgcttccgcatctgggatactcaatatgacagatgcaatatatttttacccttgtgtacttacgcatttttttaaaagttcctttactcatttaaaattgaacagtaatctttggggaattaattgacttagtaggctaactctcatagaaaggaagctaaagcttttgcttaagataaataattaaattaaaatgaaatctagcataaaaggaaatctgtcataccctaaaattagctggaaatatttgtttccacagttcacaaactatctttttgctaatgagagcaggatatttctttctctctctctctctctttttttaagagacagaaagagagagagaaagtattcaaagcaatggcatatttctgataaagacttccaaatcagcacacaacaaaagcccaaagatactgaacaagttgtttcaattatgtcacagaaaggtagaactgcgtacatgtacctgaaaaataagctaagttgcaattaattttgacacatctttttaaaaataattcaaagaagataatgttgaatctttttaatacatacatatttatttttttatttattatttttttttttttttgagactgagttttgctctgccacccagacgggaatgcagtggtgcaatgttggctcactgcaacctctgcctcccgggttcaagcgattctcctgccccagcctctggagtagctggaattacaggcgtgcgccactaggcccagctaattttttgtatttttagtagagacagggtttcaccatgttagccaggctggtctcgaactcctgacctcaggtgatctgcccgactcagcctcccaaagtgctgggattacaggtgtgagccaccgcacacagccaacacacacatatttaaagggaaatttttttcaaaattcatgcttaaatttttctcccaaattatttttttaattcaatgatttttttctaacacttttattcttttaacaatttcaccttcaaagtactgaatgaactaagaacattgattttctaacactgtacctcttctctgccaactgtcaatagttctatcatgcatcccacaaaggtaacatcactgatgaaatctaatttctctctctgcaattaaaatacccacctgttccatcagaagttcctttcttacaatctgtcaaagtgatatgcaacccctcaaaagcactgattagaatgaaaagaactaggaaaaaaccttgaatagagaaacgactaactgtgtaaagcacacaatttctttaactttcatttttaatagtattaatataaagaaccaccaaagacagtaagtattacacattcacagtgtgggaaaaaaagaacactggacagatcatcaaaatcctaggtggtggtcctaactctgtaactgacttaaccaatgattctggaccagattctttacctcacaggtttacttttctcatctataaaaatacagatgttggactaaattatctctacaacatcctaaattctattacctgtccaaagtaacagtgcaaaaaatccattttcttaaaatgttttttctcctactgactctaagcaccggtaggcaagcacacagctcaccataaataaagctaactagccagcaaattttacacatttgtatccctctaatacagttattagagtaaacttgatgaactagactatgaaggcatcttgctaagttaatttaagaatttcactttaacttaaaagaggatgtactttatactcatctctggcatgctgaattttacttcaggagtaggaatgacagggaacggggtaatcaaacatcgattcttgtcctaatctacaccaaagaggaggtctgctttgtttggttggcaacctccagctgacttgtgtacattaggtccaagtccataagaaaaggcaggggatttgacagttttaagcccatagccatgtcttacagaacttaaaacaactacaactttcaaagcccttcaaaaaaaacaggctctctaatgaagcctcagaatgttacgagttggaagagatcttggactcgctctactccaaccccatcgtcttacaaatgaggaaatcaaagcccagggtaggttaaaatgaatgcccaaagtcatgccaagtttcccaactctcagactactttctctaaaaagcagtacattttctctcacagtgtgagataaaaggaaaaaattgtttcccaaagttctgtttttgaagaggagagtgactttgacccaacccccacccccaacacaccagccaagctcttgctgtatttaaaaacatgcctggtatttgaaaagaaagcccaaacactctaacacattattaactgaggcaggtatatgaaaagattcattctccacctgctcttcctcagatgtctgattcagaagaaatagagagcaacaaatacaaatctcttcctgcttaaacagaatgtgagaaaaaccctttaaaaaaattacaaccaattcaaattctctctaacttcactttctaattagatttcactcattattgaaatggtccaaaaccaaatatttcaaatttcatcagtcttcaactgaatgctttcacaaactagaagcaaggctaatttacttttagccaagctccagttagaaaaaaatatgccaaaattctggatgttttttgcttgtgtttttctaaagtattgatatctccaaaatcatacaatatgtgcaacctccaaacaaagtattttatggagttttcattattaacttctaggtcacaaactcagaggccactaggcttacacctccacaagacactttattgttaaacacactttacgatgtataaaaatctcaaatgtaaaaaatacaacagggaaaaaaattacttcagtatgcatgtggcattacaaaatggttatgccttgtttcacctaacataccaaaaagtatatgaggccaagtcatggtaacacaacaaaaccattccaactctaaagtcaaagaataacaacacttcattaatccagtaactgttattatgcttgataaaaagcataatatcacacatcttcaaagagttgctatttcacagttacctaaatatactaacatcttttaatcaaagtatcattaaagtctattcttcctaagtacttgagtttcaatttatcataagtttctggagttgaagtttcatacaaatccagtcagtcatacagccttaggttataaatatctaatatatctaatgaattcatatggtggattttgtttaattatattatctttagaaagccaaaggtaagtataaaaaagggtttgccgtagaatcacagtgacgtcaggccagattcaaaacccctcattaccagtgttccaccagatgcatgtgattaaagggatggaatgggtttagaaggtggaactttaaagaaaaaaaaagacttcattttcccaggctgttttagacattttgataacatctctttctctttttcaaaatgtcaggcgtctttaaaggaatcgtttttctattgagcggcttcaggatctctggactttcacagtacaatcaaacccttctccagtccagatagactgaattatgttaaaccctggcacataacaaaatcattaaatctaagatgcctcatttgacagatgtctcattaaattcactgcaaaattaagtacgagatgcctttgaaaagttgggagaaacctgttaactctaagaaaactttcagagagagctattctctcaaaatccagagttcactcacgtgaaatagaagatattaatagtatgtagcacatctaaaatctcctgccatgggagaaatgccgctgtgtgtatgtgtgtttaacacatccctggggacccaaacaggatggaagctgaaaaatcagggcacacaccaccagctgcttaacaaaattccacaaattaaattcaacaaatgttaaactaaaatgccaaggactatactaggcttagatcacatacaatgtcagtgaatgttatgttaccagtaaatgaaaagctaatttcaggattctaagaagagaatgagaaacaacaaaaacattttacacttaaaaaataacttatctttgtatatatcaatcatttaaggtgggtgatttgataatcttatagcaaccaaaagataaaactttcaacctaaaactttacacaaattcatttacactcatctcctgcccctacaattacttcaatgagtacaaaagacacacgaatttaggaataactatgaaattcaaggagaagaacttactatctctagcactatataacatgaattataaaaattatacaagagcacaataacatcaagaaagcatcattaaaagacaactcgattttttaataataagtttaagcaaataagatatttaatgagaaatattttcagttactttaaaagccatgttttaaagcaactgaactgtcacacatacacacacacacacacacacacacacacccacacccctcaaaagttacccacttttcaggcaaagtgttaattctctacttcccaatgaagatttacagtttaacaaataggtatgcttgaataagagaataaagaactattacgtaaactttaattcatatcaacttaaatccaagcatgactatttgcaaccaggatatttagaacacttcagtactctttccatactgtctccttatttgtccgtcttggttctttacatttttaaaggcaccatgataaacagaaccatccacatttcacaagaaataccactttgaactagaggataataccacctcattaccaacaaaaacagcatatttttggaatgcttttaaccaagggaaaaattcaagtgtaaatttaatttagcatcgattcatggaaagtgatacgaattgcaaaataaaatacccaagctctctattctccgccctcccgaggacggaaatacgacgagtcagatctctctgtgcatcagtttctccatctgaaaagaggattgccactgactcctccttaacactgtttttgaaagggcgaatgaaataatttatgtaaaaacccttcaagatgtttgaagataataaaaaccaatgtattgtagatgttatcacgccatagtagtgaagggtggcatgtactttacaacaaaaacaaacaaatataaaatataaatataaaaatgtaaaatactaaaaaaaaaatttaaagcctctgtactgaaaattaaagggactgttcaagcacacactggtgtcacacgttcgaaccgcgttactcaatactgctgtaattatagtaataagaacctgcttgtcaatattatagcttaatgctgaaccacctctcccctcttggtttgcatgtaggaaaccacattaaggtttgatcattcccagaagagaaaataaataaaatatgacagggataaaaagattgttcccgcgaaatcccaaggagtcacacacaaaaataccttgtccgagattcactaggtacagtgaatgtgcactttattctgtcaacaccctttgtcattactaaaattcgaacagaaattgctagactactcagatctaagtgctgggagaaaagagtcaaaaaatataaaaagatatagtttaatgctgccctacatcaatgacaaaggctccccagagagtctaaaacaaaagctcattcatgtttaggagtccataacttatgtcgagcaaccttaagttcttgaattttttaacctataattactctctttcaggcaaaatttaagatgtccgattttaaaaggatattaaatacttaagtaacttcagataaagctaattaaattttcccatatcttaagtcagctaagagaatggtggcctggtagatgctataacaattttcaaaccaagttttcattaacaactctgtaattagatagtacctttatccagggccttctcgctcattaaagactttcattttactttacccagataaatatttaaatattcaaagcaaccacaaatggctttcaaagcctctaaaaaacaaccctagtcaggttataaatactaaaattgaacagaaaggtgatcttcaagagagcagaccctcaagacagtagataagctcaatttaaatgcagaaaaatattcaaaagaatttgaaagcaacttcctagctatccttaaccccaactatacgtaaacaaaacaacatgcagcaataaatttaaaaataagttatgtataaaattaccaatggggtacagaattttcaaaaaccctgtaaaagatgtcatctaaaacaaacattaattatcctcttcctacagaaaaaaactactaccaaaatgtaactctgtcctgttgaggtgtcctatattctgttggaacacagagatcatttctaggaatcacttccagcctggtgcaaaccttcactatatgtggagtcctgacaacgtttccataaatgagactacgcttttgttcatcaataactgaacttctttgcaaaaattcaagtggattcaccatacactaaattttgttctactgcaaatgaataacagcagagatgtctggtatattaacttaggcttaaaataagctcaactttgctttaaagccaaaataagcaattagacaacttcgcaacaatcaggcatttttcttctaggacacctgtacactggcttcatgttcaagaatagggtggatactttgtgtggcacccccacacatctgagtatatgtaagcacatactcagaggcatacatgcatttatgctgtacatatagaaacaaggcagtaagtgcagaatgaggtaacaattactgcttttcataaagaacaaaacaaaaagattaaaagatcatgccaaacattttaagatttaaccaggaaagacttttttaatattgagatgaggttttgagaaaaaagaaagtgcttattacccattagaatattttagacactcttgaagagaatcaaagggaaacacagattcaaactttgttaactgtgacacccaaaacctttccgtggacacttatcacaatggatatatccaatcataagcaaactctttccatataaaatttgttcaaactctaatacatcccttgtttttatatacagttccttccatgtagttaaagggcacctatttttaatgcttttgtaaaataacaatattttacaaattacatgaattaaaggagaaaagaatacagttgttgatcttacataaaaaatcatctatttcctggaccataaactttaaaagccatgtcatcgagttgacaaattgtcttcagatactgcaaatgctactgtattacgatttggttttctttacaagtaaaagattcatcagaaatccacttaaatttcagaaaaacttccaagaaatttaaagggcatctctctcaccaggaatcctgtcagtcttgcatatttcaatgtgggagtaaagatgtaaagatttcttcatgcaaactaattaaattgccactgggacacacaagctggaccaaaagacattaaattgtaaagaatggctacaaattaatggagttacaagtatgattattttccaccatcacctacaacctaaaaacgtaaagttagcgaagagttaacactcttgatttaattttgctatgagaactttattttaaataaaattccttatcactgagaacataattattcaaaccagaggaggaaagggatgtaaaactacttagaaaactcaagtacaatatccagcatctatagctcctgaatttagtactagccaaatcttcagccaaaagagaaacattacatgggtcacccctagtcaagaatttgctaatgtactgaaacaagacgggggaagatttcaggacacatctgaagaaatagcaaccacttaaatccttcttgtgaaccttcctgcaaggcgtattgcggtggtcagttctgaccataaaggctggaagaaaatgagagaaacaggcaaaatctttttttttatgcaagacaaacttgcagacgaaacagaaatcgagcaaaaaaagcgctggggaaaagtatcagttaaaaaggcacccttttgtcagatttctaatgagggctccgtgggtaatttatgagtgtggcagagctgaataaacaaaggcaccagttgacaagtcaggagctcccggtggcacatacagctagaacgctcaactggacagtcaaatgcaggcaaaagtgtgatagagcatttttattgtcatttcttctgtccgtcttatgctcacgtgacagtttacctgaaatcccaaactgcctgaaacccaacatgcccctgaggaagcacctttatggttaaaggtgctcttgccgctttcagagggatctgcttcctgtacttcctggtgattcagccacctctttcacattgctttccaacctctgagccctcaagattgataaaacgtgcagatttaaagattgctcaatctagtactacacagactgtatgaaaaagctgtaaagtttaagacaaagactcatcaggacccgcacttactcttgggttgggcaaactgacaagcaatttgaatcactcctcggtcctcggcagcttttgcaaccacccgtcaaggcaggtgacttccttacctgcatagaagcggatgaggcagccaatctccgagtccatgccttcctcctgcaccctccacagctccccaaatcccagttggaagaggtagtcattttggatctgcaatggcttctcctccgcctccaagcgccgggtggtctctccgtggagctgcacgtacagggtgggcggcgggggcggcggaggcgccttctccgcggtcaccccgctcctcccgggggtagactggaggcctcccggggccacggctgccgctgccttctcctcgcacgacccctcgcggacggccccgcccgggctgtcaatggccctcggggctttctgctgcggctgaggcgaggaagccgtctggggaagcgggaggggctgcgcggggtggccgggacggcggggctggcccgggacccccgtcggggccgaggctgcgtcggcctcgagctcttccgacgacgacgaggagccgccgccgctgctgtaggggtccaaccggtcagacacgctctcggcgctgggactcagactgaagctctcggtgtcggagaccacaggccgtggggcgcggggcgaagagacagggcccccaacgaacggctcgccggggctggagtccgagggcgctgggctggcgcggcgcgaccacccgcccgggccgccgacgggcaggggtaggtcggcggggggcgcgcgcggaggccccccgaaggcacccggcgcgctcctcgcgggcggtacctccgagtcccgcggctccgggggcgccagccgggggccggcctcggggggcggttcagcgggctcccgggcggcggcggctccgggcccctggcccagcaccttcaccacgccgccgcctttgtggcccagctgcagcaggcgggcggccacctcgccggccgtggtgtccagtgtgcagagcaccgggcgcaggtaggtcgaggccatgtggcggtcgaagacgtgcacgcagccgcgctggagctggtgcctcacccagtcccggtccgacggctgcagctgcagcgtctgccggtgcttcagaagcagcgtcttcctgtccaggctccgggtgcacagcgacgccgaggccgagcaggaggcggggaggccggcagcgccgggggagtgcgaggcagcagcggccgaggacgacgacgacgaggaggcggccgcggcggccgcggacagattcctcttcagccgccctctcctcagcaggagggagttggcgccgccgccggccccgggtacgggggcagccccgccggcaatgggctggggcgccccgcgccgcctcctgcgcccggcaccccccgctctgcccggcagcggccccggcggcgcctcgcctggggcctcttcccgcgccccgctgccgctgccgttcccgccgctcggggccgccggggtcagcgcgggctccggactccggccgcccccggccgccgccgccagagccgccgcggccgccgctgctgctgctgctgccgcagcggcggccgccggagccgaagctcggtcctccctgccgagctcggggagtcgctgtaccgtggccgcggcggcgggctccattgcagtggggcttcgcgtttcccccccagctccggaggcagcgggcggagagggaggcgatgaggcggaggtgggagacggcggcggcgcgcggagaagggagaagccaatggcgttgtgcgcggccgttccaggggattatgtggcgattcggagcattccgtcggtgtctcagtgttccatcccgcgcgcccgcctcgccgccaccgcccccccgacacacgccctccccgcccgggtcgcgggctccccagcgccggccccgcccgctacccccgcctcaacccggcgaaccagccgcggatctgggctcattgaatattaatcatgcgccgggagcgggaaggcgggaggctggcagggcgggagggccgcgtgtgcctcataaatattcatcgccggcatgacggcattccagggaggagtggggagagccaggggatggccggaggcggagcttcagggtaaacaaacgtgacgcgtgcgtacgagggcggggtggggggcagtttcccgggaggttcctgagccggcctcggagagggcagtgaagaccgacgcgcgcggtaaaccttgggagttgtggttctcgtaaggggatcggcaatcccgagggaaacatggtggactacaagtcccagcggtcctttggttctgcttctcctggccgccagcagctggccgtggccagtgagtattgtgccctctgccgttgaactctgtgccagagttcttaatgaacacgaatgctcatgttcattaacttgtattttacccgcactccagcttgccagatgacttttattttccctactaattaaaggtgagggctttcagggactgtaaacgtacgaaggtcgcaggtcctggtcctcacctgcgcccattgtatgagatagagatacacacccgtcacaccacagcatcactggcagtctgagtgggccaacctcactttttccccactttttcaagacccaggaagacaggcagcgtctgggaattctaactgaggctgtcgttgaatgtgcttgttcgaaggcacaaccctaagtctgtcctctccctctcctgtacctgaaaaggaaaatagcaaaggactgaggtttcattgtttcccattgctcttgaagtctgaagtagtttaatgacacagaaagcactggtaagtagaagaaacattagaatggagtatgagatgggctttttccacgtgttctgtcttaacgtcttctctggtttttttctttcatcattcagggaaaaaaaaaatagtttctactgccacaatgtttagtcgtggtctgaaaagttgtatttttcgtcagttgaatcaatgttgtaatcattgggcagtttactatttaaaagaatgttgtacacctttttaattgaattaccattcccccaattgctttgtaattcgggatttttcttttctttttttctttcttttttctttttttcttttttttttttttttttttggccacagagtgggtctgtcgtccaggctggagtgcggtagcgcgatctgggctcactgcaacctccgcctctcgggcccaggtgattttcccacctcatcctccgagtagctgggactacagggcttgccaccaagcccggctcattttttgtattgttttagtgggggtgggaagtcccttcatgctgccccggcaggtctcaagcgatctgcccgcctcagcctcccaaagtgccgagattacagtcgtgagccaccgcgccaggccctaaatccggattttcacatgtgaaacttttaaacagttttaaaccacatactatctatgacctgttttaacctcaataaagtgactaaacttgcagatgaagagtgaagggggttggagagagagaccaactggaacttaccgcttaggttatcacagtttcattgaacaagaatgaagaagctgtggagataaaaataaatatttctcaatgattttttacattcctgatgattttctgtattttcatttaaagtttcaccccttagcctcatgaatctattaataatatgtattttatttaaattcaatcaacagcaacatatgaaaaattagggagattgcaagttctcccaagagtgataacattttcaagtcaattaatttaacagataattacaaacatttattatgtaccagtcaccgtgttatagcagttgaataaatcacacactgtccctgccttcatagagtttacaggttagaaagaataacattcaaaaaatgcagcagaagtacagaaggggaaaatacaaggtgccacagaaatagacataaaacaagaggaactaacctagtctaagaagtcaggcaatacagaccaaagtttgaatgaaattttttggagtcagtgaaaatgtgcatttgttgaaggatcagtctctgaaagaaagggaagaaccaaagaggtaattatattgagataaatttcaactacactgatctgtgttgtgccttcagtagccccgacacaaactatttgttctagaaattgaaagaatagtcctttaatttaggcatcctttaataaaatttaaaaaacaaggcacatgttaaatttcagtactaaaacatggaatttgtatacctctttatattccttagttgatttcctacaaacccctttatatttatttatttattttatttttattttttctttttttttttagacggagtttccctctgtcacccaggctggagtgcagtggcgccatctcggctcaatgcaacctccacctcccaggttcaagcgattctcctgcctcaaccgcccaagtagctgggattacaggcacacaccaccacgtccggctaatttttgtatttttagtagagacagggttttgccatgttggccaggctggtctcaaactcctgacttcaggtgatccatatgcctcggcctcccaaagtgctgggattacaaacgagagccaccacggccggcatgtttgtttatttatttatttatttattttttgagatggagtttcactcttgttgcccaggctggagtgcaatggtgccatctcagctcaatgcaacctctgcctccggggttcaagcgattctcctgcctcagcctcctgagtagctgggactactggcgcataccaccacgcccagctactttttaaatttttttgtaaagatggggtttcaccatattgccccggctggtctcaaacttctgacctgaagtgatccacctgcctcggcctcccaaagggctgggattacaggcgtgagccaccacacctaacccagaatgtttcttctaatcataaattctatcgccattgctccttctctaagaaattacaataccgcattgaatccacccatggttcctattatttaacattacacaatcaccgcaactctgccttttttattctctagcaattttgtttactctttgaaggtatttataactaaaacacctttttcaaggggaaaaaaatttgtaccaaaaacattgctcaggttgggcgcagtggcttacgcctgtaatcccagcattttgggaggccaaggcgggcggatcacctcaggccaggagttggagaccagcctggccaacatggcgaaaccccgcctccactgaaaatacaaaaaattagccgggcgtggtggcgggtgcctgtaatttcagccactcaggaggcggaggactcagtgagccgcgattgcgccattgcactcctccagcctgagcaacaagagagaaattctgtctcaaaaaaaaaataaagacattgctcagaggatttagtatccaaataatggggaaatggggactggagagccatcatacactcctggcagataggggcttggtactgggatacctaatactaagtggtgtcgggaggaggcaggaaatgaacaggatgaatattgttacagtacctcagcataacgaagaaggaaatacattcctacctcataaaaacagtgtttggaggggtggggacctaaaatacaattttcctggatttcatgcatagagtccatcatctgaagatgacatattccattgtatgcagaataatgtaaatcagagctaaggggagagcaaaagggccggggtccactgtgtaatccttcccttgttctgacccaagcccccagtgatgttactaagcttggggtaagagaagaaacagaaagaaaatgagagctcctgaagaataaacaatcccttaccgccagatcaactggatccttgtagttgaaagaacaaattgataaagggcaatgaaacttgtacttagagcttgctagtatcgggaaacatcacccagaccatctgtgccaatgcactctatacaatttctccaaataagaaaaagatttcaataaaagacaaatgtgttccagacacccatgaaatggcagcttctcctacttgaaagtggagtggggaatacaccagtatcctaaaaccacatacatcatgaatgcccccctttaaagtgttccaaatgtacgttctaataccacatttctgactaaccacactttccaaagaatcccattttgaaatgctaaaagataatcctgaaaagaaacatcagatgcaaaagttgtgaatcctgatgccaacttgttaaaatattttcacatctaagtttagaaaaggagaacacaattttcaatttattgccacagtttactttatgctgtgtgatttataactgacttgctatgatctgcatctaggttaattctgtttgaatccttagaactaagataaaagaagtcatctttggaggtttattttctaatataagcagttggaattttaatagaggcataaattgatagctgggatgatttcagtctgagttgttaagggctcagctgtgtccagaaataaactcagaaagatgcaatatacaatgtaatacatttagttcctacattatgaacaagggatctaattatagtttcacatttttatatcccttgagctactagtggtttaccatgcctaaattgttcactgtttactcattcttttttactatgagggacccatttagcaaattactgctctagtgcactaaatgggccccaggtggccaaactgaattaatatgttccctgttcactggcaggatgagaccttatggtctctctgaagtcttacccctccctcataaaatttacaatctgaattcaatcaagagcttggattgctactatcattttaggtaatctgttttatagatacggcttgatagcttttcagattttagtgcaccctttttaatcccataattctttgtcttgttcttatttctcacatcctgcctcaccaaagtaaacagatgttccatacgtggcaacaattaagttttagaacagaaatacaggcggcgtaaacccaccccaataccctaataatgtaaattacctgggacattcattcaacaagtacttattgaactttttttttttttgagatggaatctcgctcttgtcacccaggctggagtacagtggcgcaatctccgctcactgcaagctccgcctccggcgctcaagtgattctcctgcctcagcctcctgagcagctgggattactggcgcctgccaccacacccagctaatttttgtatttttttttttagtagagatggggtttcaccatgttggccaggctggtctcaaactcctgacctcaggtgatccacccatctcggtctcccaaagtgctgggattacaggcgtaagccactgcacccgactacttattgaacgtttaagtgtaggtatcattcatcctaagtaaacagtatagacaaaaatacctgatctaatgaagcctatttataggcattggcatttaataaaaaatcttcaattaaaatcaacctattctcttccgttgtacagataatttttgtttggggcaaacaggaaacatgaaaatctatatatacaaattacatattagagtataaatatttcttctcaaagtctcatttattctttcccttatgaatgaaatcatcatacaattgttttaagtactcttataatatgaatacatttaaaatatattaattttaaaaattaatttatacctagctttttagaaacatattttggattctaacctcacacaagcacctaatacctgtttgcatcaagattcttatctaggacaggcacagtggctcatgcctgtaataagagcactttgggaggccaaggcgggtggatcacctgaggtcaggagttccagaccagcctggccaacatggcgaaaccctgtctctacaaaaatacaaaaattagccaggcgtgatggctcgtgcctgtaatcccagttactcgggaggctgaggcgggagaatcgcatgaacctgggaggcagaggttgcagtgagctgagattgggccatggcactccagcctgggctactgagcaagactccatctcaaaaaaaacaaaagataaaaaagattcctatctaacaaaaatctattttcctacgccatcccaaaacatttattctgattcttccgtgactaaaaagagaaaagtattctccagataatgattcctccatacttacattcattaattataccgtgaagaagcagcatggatattcttttcttttttccgccccattgtagagaggttttaggagactccatcagtccctagaaatcttgccctttttccctctactccctgccacatctagtggtctagactcctaagcttattagtttcctggggctgctgtaataaaccaccatgaagtgggtggctcaaaacaacaaaaatttatccttttgttaccggtaaacttgagggccccaaaagatggggtctttcctccttcattgctgcagagccaatacacaactgaaagtgagcatcacccacagcaaggtttagtctgtggccagggaatgaagaagtgggagcatggctggcaaatcaccttctcaactagtgcaggatgagggggctaaaatgtaaggcttcttaatgaaggagttggacactaaaagtgaggggagagtccaggcatggtggctcacacctgtactcccagcactttgagaggtcaaggcaggtggatcgcttgaggccaggagctcgagaccagcctggacaacatgatgaaaccccgtctctactaaaaatacaaaaattaactaagcatggtggcctgtgccagtaatcccagctacttggtaggctgaggcaggagaattgcttgaacctgggaggtggaggttgcagtgagctgagattgcgccactgcactccagcctgggcgacagagcgagactctgtctcaaaaaaatactattttggccaagcgtggtggctcacgcctgaaatcctagcactttgggaggccaaggtgggtggatcacctgaaatcaggagttcgagaccagcctgaccaacatggtgaaaccccgtctctactgaaaatacaaaaattagcctgcatggtagtgggcgcctgtaatcccagctacttgggaggctgagacaggagaatcacttggaccgaggaggcggaagttgtagtaagccacgactgcgccactgcactccagcctgggcaaaagagggaagctccatgtcaaatatatatatatatactatttttaaaaggatattttaatacatacaaaaagtaggaaggacagatctcagcatagaaaaagtggtccttcaaattgaacaaagttaactttatgaaaaacttcttaatatgtcctttttttctcttctattaccaagatcaagaaaaatgccatcccaggtcagtttcagatctcaagctggcatttgagaatcagagccagagcttcacagaagtccctgtccccagcaccttactactattccatagtcagcactagatggtcacggtaactttcaagctgtgactttcaagaatttagcaatttacagccatctgttgccatgtgtaccaaaattttgcaaaatatgaccactgcctcttcacctcataatatctgcgatcttacccatatctctgttgtaaaattgagatggcagaaaaatcaagcagccaggctcatgctcaggtgggtgcattaattaataaatcagatacagtgacagtggcaatggcataataacattcttagtctcctacacatgccatagtttgaaaggtagtgccatgtaatatttttaggaagttttataacattcgaggttagaagtcagaagtcctggttctaaactccctagctaagtatggcctggagaagacatttgaccttaaagagctttttcttactatttatataataagggattgaactacatagtgtctctaaaatctcttctggtgcaaagaaatttctaattctgactcaaagcaaaactgtctaatttggaatattgacaaatgtttttattagtcacaaagcagaaaccttcacatttagatgctatcattttgaaataaaaagactatttatttattttttgagacagtttcgctgtcgcccaggctggggtgcagtggcaccatctcgcctcactgcaagctctgcctcctgagttcaagcgagtctcctgcctcagcctgctgaatagctggcactacaggcgcccgccaccacgccggctaattttttgtatttttagtagagacagggtttcagcatgttggtcaggttggtcttgaactcctgacctcaagtgatccacctgcctccacctcccaaagtgctgggattacaggtggattcactgcatctggcctaaaataaaaagacttttcagactttttctttccatttaaaagaattgttaaagcatttagactaacagcaggtttattctgatatgtatgaaaactgctgggtttttagtcctctgaaatatgaatttgtcactaataggaactaattcatgacaacaagatccacaacttcagatccccaaactccagtgtctgtatcagttttttcttttacagtcgtggatgtgtatagatataaatctcattaccacaaagttaggttagctgacagaagctaaaacatcagctcacgtgagtacatgggcccaggagacgcagacaaggatattgatagcagcagcagtttgccatgccaaaacttgggagtcacccaattgcacatcaacagtaggatgaatcaagaaacaggagcatagttctaccttgaaatgctaatatggcaacaaaaatgaagaagtttaaattaaagtggtaagcaatataagtgaatcttttttttctttctttttttttttttttaaaaaacggagtctcgttctgtcacccaggctgaagtgcagtggcatgatctcagctcactgcaagctccgctcctgggttcaagcgattttcctgcctcagcctcccaagtagctgggattacaggcatgcgccaccatgcccggctaattttttgtatttttagtagagatggggtttcaccatgttagccaggatggtctcaatctcctgacctcatagtccacctgcctcagcctcccaaagtgctgggattacaggcgtgagccaccatgcctggccatgagtgaacctttttaaaagcatgttgggtgaaagaagccagacacaatagaatacttaccagatgattccatttatatcaagttcaagaacatgttttttaggaacacaatttaggtggtcaaactgaaacgaaaggaaaaggaagtaaataacaaactgactagggaaattgaggggattgtgactgggcaagagaacactgggcttcagcagggctgacagtgttcttgttcttgaccttgctggttacctgggtctctgctttatgaaaacgtgttcagctgtacattcttgtttcatccactttcctgtttgtgttatatttcataacaaaggtatttttaaagatcatatggttttgttacaccctgaatttctatattacgtccattcttaagagtttgaagttatatttcccgtaagttgtttaattcatttagaattgtattcataatgtaaaacaatgataaatataacttaagagttatatttatcatgtaaaacaatgataaacataacttaagagagaactttcagattaattttaagagtagtaagttcattatagaaactttggataatattgccaggtataaagatgcagggatgaacataaatcccaatgacacagttattttcacatatttcctcccagattttttttctcctatgcagtttaatgtggtagagatcacaatgtagctacattttttccctgcttttcttgcttaaaatgatgccataagcacttttccatatcattataaacagaattttaaatttctagataatggtgaattattgggagaccctgaaacttatttatacacaccataaagggtgaattcgtgatcacgcaggacactgtactggccttcagtatttttatactatttttatgctcttctacttgtggacataaggttgagatcttagccaatttttataccttcaccttccttatctccccatccttcaaaccacaacgtagcaacattgaaatcaggcagtgtctgaagccctttcttcttttttttttttgagacagagttttgctctgtcgctcaggctggagtgcagtggcacaatctcagctcactgcaagctccgcctcccaggttcacgccattctcctgcctcagcttcctgccattctcctgcctcagcttcccaagtagctgggactacaggcgcccaccaccacgcctggctaattttttgtatttttttagtagagacggggtttcaccgtgttagccaggatggtctcgatcttctgacctcatgatccgcccacctcggccccccaaagttttgggattacaggcgtgagccaccatgcctggccatctgaagccctttgtagatgggcttatgaggaagtcaaaacgtggaaacatttaccaactcctgtaatatgccagggtgcagtagccagatttagcaaataaaactataggacacacagtttttgcaataattgcacatatgaaagaattacttcatatttatttgaaatttgaacttaactaggtttcctgaatttcatctggcaacccaatgccagggcactgccagggctgtcaggagtatattctaatttaattcctttgacccctttgagagttacatacgattcccattttaaagaagagctcaggccgggcgcagtggtttatgcctgtaatcccagcactttgagagcccgaggcgggcagatcacgaggtcaggagttcaagactagcctggccaacatagtgaaaccccgtctctactaaaaatacaaaaaattagctgggtgtggtggcacatgcctgtagtcccagatacccgggaggctgaggcgggagaatcacttgaacccgggaggcagaggttgcagtgagccgagaccataccattgcactcctgcctgggtgacagagtgagactccatctcaaaaaaaaaaaaaagaagagctcagtaaggatcagtaacttctctaagctcacacagctagaaaggagtaaaacaaggatggaaacctaagctttctgacaccaagactgtggctccaaattggtggggcttaccccctaatgcttgggtaaaatggacccaactctccctcagtgagagagggtgtttttggttttcatttgttattgttgtttctttttacaaaacagttcatcaacccttttgtactgttatgtcaaaaatgagtggctgggtgtggtggctcacatgtgtaatcccaacactttgggaggcagaggcagaaggacggcttgagcccaggagttcacgaccagcctggataacatagtgtgactccatcgctacaaaaaaaaaaattgagaaattagcctggagtagtgatgcatgcctgtagtcctagctactcaggaggctgaagcaggaggatctctcagggtcagaagaccagcctggataacatagcgagaccctgtctctaaaacacatttttataaaatcaacaaaaattagttgggcatggtggtgcatgcctgtggtcccagatacttgggaggctaaggaaggaggattgttgagcctaggagttcaaggctacagtgagctatggttccaccactacactccagcatgggtgacacagtgagaccctatctctaaaaaaataaaaattaaaaataagttaaaaaatgagtatggggtaggggaagaattctggacccaggcggcagggccaagccactgaactgactcaaaacaaccaggtccaggaaaaggggctttaagctaccacagggcagcaaagaggaagctccaacacaccccctagccccaccctttggaagccagaagactcacccatcagcactcttcctgatgaccatcagatgagacattttaatttcatttgctcctggaaaccccaaggaaggttttgggttttgatttgaggtagggggcaggggctttatttacttattcaggtttaaaataaatagtaaaaagggtgaaacttccagaagtggttccactgtcatatgggaggaaacatgatccaagctgtgtgcgttatcttcatcccctcctgtccagccaagagtctggccccacagcgtggcacaggccaagctcccctctcttgtgccctctcattcattcctttgcaacttgctgctttccttccccacacaagcagattctaaatgagccatttggcaaacccctcagagtactaccactcctagccaggaggtgaaacttccctaggccccaaacggaggagggacagaagtgccagtgtctgaggagcgtgggtgcaggagacagaatggagctgaatcaggaaaaatgacagaggccccagcctcatttgggcccgagattcccctgaatgtggctcttgtggcaatcctaggtgaggtctttggtaggacttgggagaaacacacagacccccacaacgccacccactaaggcccccagccttactccaggcaagcgtatctgctcaatggcatctagctctgaaccaacgagggcctgagtctctctgcaccaaggggaagcaagtgtcaaacccacacccagcatctggcagcaaacagcagctgcacttcccctccctaagtctctacggcctcagacttgcattctgtcggtccccaaagcagttcagggtcctggcacacttgccaacgcggctttcctgcaaagctcaaccaacctgcaggcaggcatgcagcaagcccagggagcagcttcagtgtgcggatacgggttccatcttcactggctgtcagaggaaagccaagatggactccacatgcccctcaactttactactgaaaaccagttcctactgcctctaggcccttgggtttccttttcatagagcatttacttcatttttaaaaatttttattttattttaaattgagatgagatcttgctatgttgctcaagctggtcttgaactcctgggctgaagggatcctcccacctccacttcctgagtaactgaagttacagaccagagccacaacacctgcctgcagagcatttactttaaaaaacttgtcattttaaattctttctctacctcttttttttttctctcttttaactcatctgtattcattacaactttaagcagaatgtgactcgggcactacatttccatccgcaagcctggctctgagtttttgttattttatcttatttttttttttgagacagagtcttgctctgtctcccaggctggagtgcagtggcacaatctcggctcactgtaacctccgcctcccgggttcaagcgattctcctgcttcagcctcctgggcagctaggattacaggcatgcaccatcacgcccggctaatttttgtatttttagtggagacagggtttcaccatgttggccaggctagtctcaaactcctgacctcaggtgatccacctgcatgggcttcccaaagtgctgggattacaggcgtgagccaccgcaaccggccaattttttgaacactttatgatgcttagagtaggctaataattttgctcctccaagcaatacttttctttggaaaacaagccctgtggagagttccttccatcgagttgcttcagtttaacctatttctagaggactagcacatgcagaattggcaactacagggaatgaaaagttcaaaaagtagatcctagaagatgttaacaaatacttttctcctaaacatcaaggtacacctcagaacactttgataataagacttggtctactagggaatctggcttgatagctaaatactttagaccacaaggttagtatcagtttacatacttacaacacacgttgccttgatctgttaaaataagccaatgtgaaactacgaaagcattactagctctgccttagtgcctaaggtatcacagtatcatttagaagtagaaagaaatcttatcttccccttaaagtattgtcatgccataccgatttttattttttttatttattttttttgagacagagtttcactcttgttgcccaggctggagtgcaatggcacaatctcagctcactgcaacctccgcctcccaggttcaagagattctcctgcctcagcctcccaagtagctgggattacaggcatgcaccaccatagccagccaattttgtatttttagtagagatggggtttcaccatgttggccaggctggtctcaaactcctgacctcaggtgatccatttgcctcagcctcccaaagtgctgggattacagaagtgagccaccatgcccagccgccatacagactttttaagtgttaacaaaaataaagaaaaaaatccttgaaaatatactatcagaggaattgtagaacattgaacacatgtagaagtcattcctcagccagagcgtagtctacttcttccatgcatgatgtgtcatcgtctcctttgaggggtggcatttgtttctcagctgcactggtctttctctacctctttgagatgtatgtaaatatatgtgtgtgtgtgtgtgtgtgtgtgtgtgtgtatgtgtgtatatatatatatatatatatatatatatatatatatatataatctcctcttgccagctttaccacccaggaatgtctttctcaaggacccaggagccacctctttgaaatgtaatcatcaaagcagatagtgccctatgtcctcagtgtgggaggatgggagcctaacgtcagtgagtgttgtgctcccacttgaaaagctacctcgtatcaaaaagataggaggagtttatgttccagttcttttctttttcttttctttatattttttgagaaaggcctcactcagttgacaggctggagtacagtggcaccattatagctcactgcagcctcaacatcccaggctcaaacgatccttgcacttcagcctcctgagtaactgggactacaggtgtgcaccaccatgtctggctaaagttttaatttaaaaaaaaaacaaaacaaaacatttttttgtgtagagacaggatctctccatgctgcccagactggtctcaacctcctgactcaagtgatcctctcgcctcagcctcccaaagttctgggattctgggtgtgagccactgcactcggcccagtactcctcaacttgctcactccaacccttaaaaaaccctactgccccctgcttcagtggagttgagtttagacttagctctggtctctctcctctatttcaatagccttcaataaagtcttccttccctgtttaactttgtctggggcaatttttgctttgctagggaacatttagtttctgatttttgcccaacttttaaacaaattataatgtttccacattggcaacatgcttgtaaattagaattaccctagaaaagaattggacatagattcaaagctgcaaaagtagacacttaagaaatgtgacttgataagaaaggcttccattcccctaaaatatctccacagcttctccactagcctcacttgacttaaaatggccacattttgataaagagatggaaggaccaagatcatcaagggtgagagagagagctcatcactcttaggggacagttaaaatgctatgggacaccatacaaaaaaataatttgagatggatcttagatcgaaacttgaaagataaaataacaaaacttctgaaagtgaccttggggtaggcaaaggtcttaagacacaagaaagctcttaaaaaaagaaaaaatggtaaattagtcttttttttttttttaccgttaataacatctttttatcaaaagacaacaccaagagaatgaaaatgcaagccacagaccactgggagacaacaatttctattcaggatatgtaaagagctcctacaaatcaataagaaaaaatcaatcccttcaattaacaggcaaaacaaacaaacatactatccacaaaagaagatctcagaaagccaagcagcatgtgaaatggtgctcatcatcattacttacaaggaaaatacaaattaaaacaccctaagatacccttacacatctttaaaagactaaaattactaaagtgacaataccaaatgatggtaaggttgtagagcaactagaactctcatgcattccactctggaaaacggtttgacagtgtttactacagataaacatctgtctgcctgatgaaccagaaattcccctcccagatgtgataccccaaggaaatgagtaagtatatccaccaaaaaaaaaaaaaaaaaacaaaacaaatatatgaagatgcacagcagcttcattcataaatagcccaaaataaaaaacaacccaaatgcccatgaacaggggaatggaaagataaattgtagtgtatacttaattgtgcaatagaattaatgagacacgcagcaacatggatgaatcttaatgctattatgtggagcagaaaaagacacagaagaacccatattatatgattctgtgtatatgaatcaagattaagaataggcaaaactatgtaataagccagtcacaaagaggtaaatactatatgattccacttatacatggtacctaagagtagttagatttatagacaaaaatagagtggtgtttgtcaggggctgggagttgggtgaaatgagtagttggatggatatagagtttgagtttttcaagataagctctagcaattggtggacaacattgtgaatgttcttacctttgctaaactgcacactttaaaatggttaagtccaggtgcggtggcttacgcctgtagttcaaagactctgggaggctgaagttactgaatcttttgagcccagcagttcaagaccagcttcggcaacatggcgaaaccgcatctctacaaaaaaatacaaaaattagccaggcgtggtggcatgcgcctgtagtctcagctactcgggagactgaggcggaaggatagcttgagctagggtggttgagcttgtagtgagctgagatcatgccactgcactccagcatgggagacagagtgagactctttctcaaaaaataaaataaaaacaaaaacaaacaaataaataaataacatggttaagttggtaatttttaagctatatatatatatagtaacacaattttttaaaagaataggcaaaactaatctgatgcaagtcagcatacaggagacctttgacagagggcagtggctggagggggcctctggactgctggcaaatattctattgatttatttggattgtgctattgagccaggaaagtttaaaggtctgtgtcatatgaatactttactttgtacctatccctttagtaaaaggttttgcctttttgtttaagacacaggaatattggatttgtttcacacatttattacataaaactctgagctcttacatgtgacataggaagaggtggaatgttgagtagagtaggcaggcccagggaaggacgaagccgtggtgaatctatggagataatgccaaaacaggcagcaaaatctggaagagaaaataaaatggcaatcatcttgcaacttcatctaggggtcttaattcctacattttttctgtaagataaatgttctgaccaaacgcatgtgaaccaggagctgtcttctctgtttgagctccatgtgaacctagagacctggacttcaaatgagttgtatttattgtcttcagataatacaatgccattatccaaattgtggtgggccatttatgcagatgaactaaatcaagaaagttttattgaacaactactttgtaccagggaatttgctaagtatgagaattacaatgatgaccacatcctccacagacccacccctcttggatcttagagccttggaaggagaaatgcctgctttttaattcagtattgattttctggctctataaaaataaattaaatgtgtgttggctgggcgcagtggctcacacctgtaatcccagcactttgggaggccgaggcgggcagatcacgaggtcaggagatatacaccatcctagctaacacggtgaaaccccatctctactaaaaatacaaaaaattaaccgggcgtggtggcacgcacctgtagtcccagctactagggaggttgaggcaggagaatcgcttgaacctgggaggcggaagttgcagtgagctgagatggtgccactgcactccagcctgggtgacagagcgagactccatctcaaaaaaaacaaataataaaataactgtgtgttaagtctccaataagaatcagcttctcaaactggaatttagttctgtcctttaatatcacataatctgggaagggagggaaggatggaggcagcaaggcagggcccaggaaaaggaagggaggaaagggctgactactccactggactggaatgggatatatgcagcttttaaaattaaaagacagaaaaaacttaaacctatagacaatagatgatagaaaatagaagaggtttcttgactccagaatattacaaagaatgaacgatgattttctaattataccttttctgtattctgaaggtggacactttaatattaacatcaattttctaaaattatgacctactctgcctctggtgcttgcaagaataaagacttcactgaaatcaatgcatgttagacttaaatcaggcaaagggcatgaagaataatagtgtaagaaagctcatgtttttattttccctacttaaatgttaagtactaaatactattagtcaatgttgattgataacatttatttatttattttaatttttttgagacaggaccttgctgtgacatccccactggagtacagtggcacaatcatggctcactgcagccttgacttcctgggctcaagcgatcctcccgcctcagcctcctgagtagctgggactacaggtgcgcattaccacacccagctaattttcgtatttttttgtagagacagggtttcaccatgttggccaggctggtctcaaactcctgggctcaagcagtcttcccacctcagcctcccaaagtgctagcattataggcatgaaccactgcacctggcagattgataatatttacaattaatagtgataccaaaacacagggagaaaaaataattttagtcaatgtgttttaaaaaaagagagaaaaaattggagacccataatccaagattagaagactcagggagagagaatcatatagaatttttggaataaataacagttaatatatagtattttatggtatctgcagcctacttcagttccattttaagttaattatagttgcaaatgaatacaatttctatataagactgagcacagacgatttgtttatttattaatatttgcaggggataaactggcacttccaaatgaaaaatctttttctttttcttttttttttttttgagacagggtcttactctgttgcccaagctggaatgcaatggcacagtcacggctcactgcagcttcaatctcccagactcaaacgatcctcccacctcagcctcctgagtagctaggaccaaatgtgtatgccaccacccctgactaatgatcaattacattgtggaatttttttccagattaatggtcatttcctaatccattgaatgtttttttttcagggtggactataaacaaagaataggatgttttgaaaaaagtgacaccttaatgtgtcagccttcctgctgacagagtgttttcatgtacatcctcttacctgatcctcccaacggctctgggaagtggataaatgacgaacataatcaggatatgggcagttatgattaggggctcccactcatggaatttgaggacaaggcctctgaaaatgaagaatggttgaaagtagacacttacagaaataacccatactaaaatgtaaatatatttctatggagacctgaaagctacccaagatcaatcaaagtaattatagtgtatccttaggactagaatgtacctgaggaaagctgcacttttgccaattatagagtaatataactgtctgaaagaaggatgttttagtggaaggactgttaaatttgaagggaaccaaagaataagactttatccacattgtttagcaaaaaagatgggctgggtatggtggctcacacttgaaatcccagcactttgggaggccgaggcaggtagatcccttgagctcatgagtttgagaacaacctgggcaacatggcaaaatcccatttctacaaaaaatataaaaattagctggttgtggtgatgcatgcctgtactttcagctacttgggaagctgaggtgggaggatggcttcagcccaggaagcgcaggtttcagtgagccaagatagcaccactgcactccagcctgggtgacagagggagatactatctgaaaaaaaaaaaaaaaaaagctctcatcaatgataaaggtaagcacaacctgtttgaggagcatctggtaattaaccccaagtcagcctggaagagagcaggctggtggtggtaaaggaagccttcctaaaagagatggcacctgagctgtattctggaaggcaagaggacgttgaccatgtcaaggggaagaggtttctgccgaacatggggctgaattactgtgtgatgttgacctctctggatttcactctttcatctataaaagtcaagaattccagctgggcgtggtggctcatacctgtgatccgaacactgtgggaggctgaggcgggcagatcacttgaggccaagagttcgagaccagcctggccaacgtggcaaaaccctgtctctactaaaaatacaaaaattagctgggcatggtggctcacatctgtaatcccagctacttgggaggctgaggcacaagaattgcttgaacctgggaggtagaggttgtagtgagctgagatcacaccattgcactccagcctgggtgacagagtgagactgtctcaaataaataaataaataaataagaatcatttgactccagcgtttttcatgctgagcgatcccatacaccaataaaaaatcagaaatgttcctgcttaaggccaaaataaagtacaatccctttgtatcttctcacctagcaaaaaaccataaaagacctttctatgcactttcacctattagtaggaatattatgtcttctctttccagtttgcaaagtcaaaagtccaagtcattcaaggtcagtgcaaaagcaggcaaactggccaggtcattcagatttgcaggaaaaatgtgtcatctgcactgaatgcatgatttaacatgttcagtgtgatttcacagcacagtgtctcacagtacaatggtccacgtgtgtatattcaccttagaaagtggttatcaccaactaaacctggacaaagactatgaaaagaccaaggagaaatggaaaaggacaaatacaaggatgagactactgagaaaaaaagtcataaagtcatcttatgtacaacttttattaaaaactgctaaaatgagccttttaaaaagtaacaccaatttttgtttaaagaaagctggctgaaaaatacttatttaactctgatctctcaagaaatcctactaaaatgacagtggatgttctaaaaatatagaaaatttgcaaagatatggaaacaacctaaatgttcatcagtggatgaatggataaagaaaatgaacacacactcacaatgcaatgttattcgtcttttttttttttttttttttttttgagatggcgtcttgctctatcgcccaagctggagggtagtgacacgatcttggctcactgcaacctccacctcctgggttcatgtgattctactgcctcagcctcccaagtagctaggattacaggcacccgccaccgtgcctggctaatttttgtatttttagtacagatggggtttcaccatgttggccagggtggtcttgaacccctgacctcaagtgatccactcgctgttggccattctcaggcccaccttggcctcccaaagtactgggattacaggtgtgagccaccttgcccggcctaagaaacctgaattctaagccagcagcagggagagctgacaagcaacctactttgcaatgcagaacctcctgaagatgtgggaactggtgacaccaggcccttctggaactgtaagtaaagatgggtacaaaaagaggaggctgcaaatggacttgggaagcaattgtgtcactagacatcagatgccttgcaccttctgggaaatagttgcctttcagagtttattctcttgaaaaagtagataaaattgagagttcctgggatgggagaggcactaaacaatttcagttggggttactgtgctggaaacagggggattaaagtaatgttttacatactcctccctcttccttcactcagcccccagccccaaagccaccatgtgcagttgaacaggtttgtcctgcacagggcacctggctgaagggctgggtggggttgagattgagctcctctctccggcctctggccctgtgcctggaggaaggtgcccctttccctcattctccagaaggtgccatctgatcaccaatgctgctcctgcagggctgcctcttggaggaatgtgcccctttccctcattctccagaaggtgccatctgatcaccaatgctgctcctgcagggctgcctcctggagagaaggtgcctcttcctaattttcacaaagacctggcatggacttgcaatggcccgccctgggactctggcagccaaacttatactcttcatgaaagatccttttcaggggtatccaacaagccttcccccaaagcacccaacaacagcccagtcgggtgaccctgcagcaaagcccatagctgaaaagctgtgcagacccagcttcacacccaaccaccagcaggcagttgaaaatccatctgaagaaaacctttatcaagaaaacagaaatgagctgaaaaaggcaattggacagaaatagacttttaaaaactactcatccgtgtcttcagaaatgagaaatattattacctgcatgaaacaagacgagatatatgtatgtaaaaacacagaataagaaagagctttttgaaattaaaacaggataaaagaaatgaaaatttcaatagaaagcttgggagaaaagttgagaaagtaggataaaaatggaaaagaagccaggtgcggtggctcacgcctgtaatcctagcactttgggaggccaagtatatcacttcggtcaaggaggtcaggagttcaagaccagcctggtcaacatggtgaaaccccgtctctacaaaaatacaaaaaattagccgggcatgatggcaggtgcctgtaatcccagctactcaggaggctgaggtgggagaatctcttgaacacaggaggcggaggttgcagtgagccaagatcatgccattgcactccagcgtgggcaacagagtgagactctgtctcaaaaaaaaaataaataaataaagaaaagaaagaaagaaaagaaaaaagaaaaagaaaaggaaagaaaagaaaagaaaattaggccgggtgctgtgactcacacctgtaatcccagcacgttgggaggccaaggcgggcagatcacttgaggtcaggagttcaacaccagcctggtcaaaatggtgaaaccttgtctctactaaaaatacaaaaattagccaggcgtggtggtgcgtgcttgtagtcccagctactcaggaggctcaagcgagagaatccttgaacccgggaggcagaggttgtagtgagccaagttcgtgccattgcactccagcctgggtgacagagcaagaccccatttcaaaaaagaaagaaagaaatagagaaataagaaagcagagctcaggaggcaaaacaaggtttggaatagagactttgtaattatttaaactggaagagaattcactctataagaaaaatggtgttgagaaacaagagaagagagcttgaaggcaaacattttataagtgccatttacagtgtcaagagagaaggaacttccattgagagaatagccaagaaacccaaggaaaatgggagtttcattaagggggtagggagtgatgattaaggtcaagggctcaggaggtctaaaaggcccagatcattagaataaacagtgaaaaatttctaaacagggctttctaatctgaggattaagctcataccctttaacgggcattaaattttagagaagattttgagttttggaaagatcttgtatttttccaggacaccacacaatgaatatgaccctgttttcagtaaatacacagttgtctttcatggtgtggtagcacaaaccctgcattaataagaaagtgaatcttagggcatattgtcattaccattcccatacaaagctctgtccctatttttcatccacacaagggatggcattgtctgccagagatgagcatttgaactaaagttcatggcttggctgggatcttccttttggctgcactttcccagcgatcagctgcctgtcataggctctggtgttactgacaccccaaacaagacggaagctcaggaaaacaaacaactcggagctgctttcccttcctggagtgtcaaaagctacattcaaaataccaaatgttatattaaatctcaactgaagatgaaagcacgctcggtgaaagattcattatttcactttgctgagtcgaattcaaggcttggcttcaggactgaaagccataattggtagcaaatgttccctaatctttccacaagctattttctcattttctctttctagcatagattgcactccacacttccacactctccaagcagatgtaagatgaacagaaaagtctagttttgtattttttaaaagcccaccacaacactttacgactgaattttcccatttgcctgtttaagtttccgctgccatccagacatttccatctcagacacatcagaggcaaaatagaagaactgtattactttggaattcaaaaagtttacacaagtccattagtaacgccccaaagagcctgggtggcaaacatttttagtgccagcatattaatcagtttttccctaaagtgttaactaaatggatagtcttcaggatttcctgaggccccctggtcagagttgcaggagcacagcacatgagcatgccacaacaccactgctacctgcctgttcccatgacaccatgctacatgcctgttcccacaacatgctacacgcctattcccacaacatcactgctacacacctgttcccacaacactatgctgcatgcctgttcctatgacaccactgctacatgcctactcccacaggaccatactacatacaagcctgttcccacaacaccatgctacacacctattctcacaacaacatgctacctgcctactttcccaaacaaatcataggaacttctgtaaagcagtgaatagctgaaatgtcattctaaaatgcatattttaaagacaacgagggaaatttctaatttgcaaaattagaaatttgcaaagatttgtgatgcttgataaacagtcccagggtagaatgagctttcatctatgggaatgtattcatacatactatcatcttacacttctttcattcattaaaatactttttaagcaaaaagtacaatgagatcagttgtaaatgatagatgaaccttcaaagtccattggcttagttccataatagggccactctggaaatagaagacaggagagactcttctagtatgtagccgtgttcctctccagtgtctgctgagagtcttcagagacgagcaggggtgaggatggagcggaggaaaagggattcctctccgaccgcacttgcactgcaggtggttgagcaggtgttctccttagtgaaggtcccctgatggagctgatctcctgcaagccttgaaatgcagtccctgaagcaatggaaaatgtcagatcctgtatggggtgaccagttaggaagagaagaaattctcagttgaacttagacaaacctaagccagagaaaaatgttttaacatgctgtcttagagctgggatgatgagcaaggaggaagagaactcatacttcccatgtgcctagtttaagctcggtattctgaagtgcttaactcacttcaccctcacaaatttcctggaaggtggctaactctaaaatccccaccttggtctacaaggcaacagggactcttcttctgggcacctcccctccaacgtcttcacccttccggctctcctgccccagccaccaaacaggctgtgactctgctgtggtgctgtgcccctgcctgggtattctgcccctagatttgtgactgggtccctcactgccttcatttaggcctccttgcaaatgacacctccttatttaaatggcaccacccccatgctctttccccaacgctgctttatttttctgcacagcatatatgctgagttgaataatgtcccccaagaattcatgtccacccagaacctcagaacgtgaacttgtttggaaatagggtcttcagagatgtaattagttaagatgaagttatattggatgaaggtaggccctaaatccaatatgactggcatctttacaagaagaagagaggacacaaagggacacacacaggaagaaggccatgtgaccaggacgcagagactggagtgatgcagttgtaagtcagggaatgccaagggctgcaggcagtccccagaagccaggaagaggcaaggaaggattcttttagggaaccttcagaggacgtatggcgtggctgacacattcatctcagattgctggcctccagaaccatgaaagaataaatttctgttgttttaagccacccaagtttgcagtactttttcacagtaaccccaagaaatgaatatagcatttgtcactacctgacatatatatatgtatacatatgagtttttttgtagtttttttgagacagagttttcgctcttgttgcccaggctggagtgcaatggtgcaatctcggctcactgcagcctccgcctcccaggttcaagtgattctcttgcctcagccccccaagtagctgggattacaggcccatgccacaacccctggctaattttttgcatttactagagacaggatttcaccatgttggtcgggctggtctcgaactcctgacctcaggtgatccacccacttcagccacttaaagtgctgggattacaggcgtaagccactgcggctggtcctatatatattttttttatcagttagttcatctctgtctttccccacagggacatacagtctttttttttttttttttttttttctgagacagagtcttgctcacccaggctggagtgcagtggcatgatcttggctcactgcaagcttaagcaattcttctgcctcagcctctccagtagctgggattacaggcgcgtgccaccatgaccagctaatttttgtatttttagtagagacggggcttcaccatgttagctgggctggtcttgaacgtctgacctcaaatcatccacttgtcttggcctcccaaaatgctaggattacaggcgtaagccaccacacctggccagacatacagtctttaagacagggctttgttgttcttgttcattgttgtgcttctagtgactagatccttaagccattgctagctttggggatggaagggaacaggcattcaggcagtcctccaggagccaagaaagggaaggaacgcgattgtcccctacagcctccagaaatgaatgcagccctgcccacatcttgacattgggaattctgacctcccaacataggataaaagatttgtattaaagccagaaaatttgtgataatttattatcacaaaaataggaaaccaatatgcattgtcacctagaatgtgttttttgctctctttctgtcccctggttgagctctcccataacctagggccaagggaagggtcaattatgtgcccactgatacctctgacctggagacctaaagttgcaaataggatgttagtgattagcagcaaaggaaaagatgataaatgctaatgcctctgcatccatttaagagctgagtgccaacaaatttccaaaaatagaattcagtgttctctgaaactcttgaaaataaaataactttgaaaaagtaatgtaaagccatgaataaagatcatgggatggaacattttcttccttcctgacatagaaactccttaataatatccttacatggggatctacgaaaagaagagggggagggataccaaagagcaaaattccgcatgcttgccaaaagaaatataaaatattgaataatggtagggtggtttgctagaatattttttaaaaatatttttaaatgagtccccccacctccccacccagttatagaggagtggtgagaggagttcttgtttattgaagaagttgggagcttggacagaggaagagcaactccaccttctgcaggaaaactgaatgagcaggaatctgggattcttaccaaggctcctgattccagatctaatgatcttctgcatcatgtatcattgctgattacaaaggaaaagcaaaccaacaaacacatctccccaaaactggggaggcagccttggacctggctatttcagttgaaagagctgaggattggccagatgcggtggctcacgcctgtaatcccagaactctgggaggccgaggcaggcggatcacgaggtcaggagatcgacaccagcctggccaacagggtgaaaccccatctctactaaaaatacaaaaaattagctgggcgtggtggcgggtgcctgtaatcccagctactcgggaggctgaggcaggagaatggcatgaacctgggaggcggagcttgcagtgagctgaggtcgcaccactgcactccagcctgggcgacagagtgagactccgtcttaaaaaaaaaaaaaaaaaaaaaaaaagagctgaggatttagaatcagacacacttgggggagttctcgctccttctcctgcaccagcagtgggaccttgagaaaggggcttaactccttaagcccctcagctcctgcgtttgaaaagtggccattataacccctacctaggagagactataaggagtcaataaccaacacttcgcctatgggcaaatagtcaaaaaatagtaactgttactatcattatttttcaatcactatttaatctagtgcctcaaagtccactgttagagagaattcatttaggttattgacttaatcttcttttaaaaccaaaataccctggcagggattgtacactatatcacaatcaggaactcacatctgagtgtgaatgcctttttcagatagagggagaaggaagccgggtaaggagctaaaacacattttgcttcagaagcgcattcggccatgaccttgccagttactagctgggtgattctgggcaattcatggaaacttcttgagccatgttgccctcgtctgtgaaatgggaatgctgtatttaaatggttattgagtgaatcaaatgagcgaacatgtgaacatgctttgtaaactgtaaagagtatagatgaaaaagccaaactctaaaatatttggagaggtttattctgagcaaatgtgaagaccatgacttgtgacacagcatcgggcagtcctgagaacatgtgcccagggtgattgggttgcactgcttcattttatactttttgaggaaacagaagttacaggcagagacgtaatctgtacgtgtaagttctaaattggtttgccctggaaaggggacatattgaagggcagggagaggtggcttccaagacataggtggattcaaagatttcctgattggcaattgattgaaagagttaagctttgcctaaagagttgaagtcagcagaaagaaatgcttggggctaagataacgggagttgtggaagccaagaatctattacataggtttcagagagagtagctggtcaatgtctcttatcagagcttaaaagctatcagggggccgggcgcggtggctcacgcctgtaatcccagcactttgggaggccgaggcgggtggatcatgaggtcaggagatcgagaccatcctggctaacaaggtgaaaccccgtctctactaaaaatacaaaaaattagccgggcgcggtggcgggcgcctgtagtcccagctactcaggaggctgaggcaggagaatggcgtgaacccgggaagcggagcttgcagtgagccgagattgcgccactgcagtccgcagtccggcctgggtgacagagcgagactccgtctcaaaaaaaaaaaaaaaaagctatcaggggctgggtgcagtggctcatacctgtaaacccagcgctttgggaggccaaggctggtagatcacatcaggtcaggagtttaagaccagcctggccaacatggtgaaaccctgtctctactaaaaatacaaaaattagctgggcatggtggcacacgcctgtaattccagctactcaagaggctgagtcaggagaatcacttgaacccgggaggcagaggttgcagtgagcctaggtagtgccactgcactccagcctgggtgacaagagcgaaactccatctaaaaaaaaaaaaaaaaaaaaaaaaaagttatcaggctcttagtgaaatctcttgtggaacaggaaaagacctggaaagagaaggaggctgtctgcagaatgtaaattttccccacaagagatggctttgaagggccattaaaaaatatgtcaaataaatatatgttagggtaaaatactttgatttcctttagggcctgttacctgtcatatgatgttatcagtatcttactgctacagagagtctgttctgtcagtctgggatgtgtatgctaatgtcaatgttggtcggttgagtctgaactccagaagggagagggtataatgaggcatgtctgacccctgccttcccattacggccttaactagtttttcaggtttcttggaatccctttggtggattccatgaaacgcagttcattcagccggttgggggacttagaattttatttttggtttataagagctatggcagctttgaattatattaccttggggcttagaagaattttctcaactgatatactgatatattccaagcacgaaattcttcactattattatctaaaaccatttataatttattattatacattattatattaaacattataattttctgttataaatatgattcagattgaactctcattttcttccttggtggtattactctgaactcagctgaagaaaaagagttatattagagtaaaaaatgggctgggcacagtggctcacgcctgtaatcccagcaaattaggaggccgaggcaggcagatcacttgaggtcaggagttcgagaccagcctggccaacatggtgaaaccccttctataataaaaatacaaaaaattagccaggcatggtggctggcgcctgtaatcctagctacttgggaggctgcggcaggagaaatgcttgcgcctgggaggtggaggttgcagtgagcaaagattgcaccacgtactacagcctgagtgacagaatgagactccatctcaaaaaaataaaaataaaataaattaaaagtaagattggaagtcagagaacaagaaaatcatagatgtggatctaatgtttcctttgatgaaactgtccccctcccgcctccccgtttctctatgttggatgctgctgagagttctacattgttggcataaaggctagaaaccagtaataaaatataatcagagcagaaagtattagaaaaaaagcctggggaggaatttactttaaaacaatgttgccaggttatttcagcaggtaatgtgagccaccaatatgttttattttatggaaaagtagatgattcaattcgcacacatgcacatttatgtattcagatacatccgtttattcagaggaacatttaattttagcatgaattcaaagaggttgaaagctgcttcaaaaggagttttgaggacataccttaattagatgtcctcatcaactatctcccatttttttcatgttccctgatatgaagttgaaagcatagttagaattggaagttatagcatccctgcttttagggggctacatataaaaattgtgtgatggctcatcgtttagcaaattaataatgccctagtaaatgcaccagggcacagtaaggctggatcaatttttacgcagcctgctctggagagagccttgcttgagaacagcaggaaaccttatcattaatgaatgcttttctctacttcctttcctttgcctacaactgatttgaataacaatgtcactttgcaatcactaaattgaagacatatatttttgaggaaataataatcaccttcccctaccccactctcaagccaaccaaaaaatctccattaatacatacagcagctgcgtgcaaagtctcgaaagccttgagactgtctgcttggctgactgagcacatgagatgaggatctggacctggcatgacagtttcctcaatgcgatgcttgtgagttttctctttgtgagggctgagcaattacagagtataatttcaacagaagtgcttaactgcaaagagctcattttacacaagtgcctatagtaaccagggccacacagccggatagaaaggagaggaaagaattaataactgatatattctgggtctctaaagtattctaaaaaagaactgttatgtttctaaagaaaacaactgcttgattataggaatctcttctatgatgccattttattgagttagaaaaaaaattaccttatcctcaatttgcatgacaccactagaacaatgccaaagggaacagagagatcaataaacagtaacggagtcttggtatggtggcactttgggaggctgaagtggaagggttacttgagctcaggagtttgagaccagcctggacaacatggcaaaaccccatctctactaaaaatacaaaaaattagctgggcatagtggtgtgcactacttgggaggctgacgtgggaggatggcttgagcccaggaggtggaggttgcagtgagcccagatcatgccactgtactccagcctgggcaacagccttttctcactttctcaaaaaaagaaaaaaagtaacagaaacatcctatataatcacctatattgttaaaaagaaaagcaaatagtgtaagatagtttcctctttaactatggcccaccaagtacttaaaaaatagtatgaatatatgaatatggtctccccactcacctcccaatcacagttattgttttaatggtttaatgtttgtgtggtccttttccctgcaacagtttgcatggaagaatgttccccaattttcctgtgtaaagcaggtagacaaaccagaaagacagaaaatttctgattttgtacatggctacataattaaaaactctgtacccctcatggaaactagcttgttggtggaggtgaatgaattattcttagcacatgaggataaatatcagatatggacggatagtttattaagtgacaatcttgtctattgggggaaaattcattatttttattttctggaaggccatctccaatgctgagtgtatattttggtttgtagagtacagacacctttaaaaatgtttaatcactcatgttttcaaagatgtagtacatacacatgggaccaaattcaaaagatacaaaataatttacaggaaagtccccatcttattcccactctccagggaaaaccactgttaacaggtttttgtgttaccttccagaaacatttctatgcacgtaccagcaaatacatactgtcccaatccttattttcttctcacttatctctttatcttggatatggttccatatctgtacgtaaaaatgaactttggtctatttcacatgggttgaagacacattttatatcctataaatgtaaaatggggctggcatggtgactcacgcctgtaatcccagcattttgggatgctgacacgggaggattcctcgagcccaggaattaaaaaccagcctgggcaacatagggagactgtctctacaaaaaattttaaaaattagccaggcactgggggtactcacctgtggtcccagctactcaggaggccgaggtaggaggattgcttaatcctggaggtcaaggctgcggtgagctatgactgtgccactgcactccagcctgagcaatagagtaagaccctgtctcaaaaaacaaaacaaaccaaccaaccaaccaggaaaacaaaaccaaccctggtcagtgtggtggctcacacctgtaatctcagcactttggaaggccaaggaaggaggaatgcttgagcctaggagtttgagaccagcctgggcaataaagcaagactttatttctacaaaacatttaaaaatcagtaaaaaaataaaaataggccgggcgcagtggctcacgcctgtaatcccagcactttgggaggccgaggcgggtggatcacaaggtcaggagattgagaccatcctggctaacatggtgaaaccctgtctctcctaaaaatacaaaaaattagccaggtgtggtggcaggtgcctgtagtcccaggtactcgggaggttgaggcaggagaatcgcttgaacctgggaggctcaggagatcaagaccatcctggctaacatggtgaaaccccgtctctactaaacatactaaacatacaaaaaattggccaggtgtggtggcgggcacctgtagtcccagctactcgggaggctgaggcaggagaatggcatgaacccaggaggcggagcttacagtgagccgagatggcgcccctgcactccagcctgggcgaaagagcgagactctgtatcaaaaaaaaaaaaaaaaaagaagttacccgtggttccttgccagatgacttccttacaacatggtggctcatttctccaaggccaacaggagaatctctcactctagtcagctaagacagagtcctccacaatggaacttaatcacaggactgatatcccataacctctgtcatattctattggatagacacaaatcacaagttccacccttttttaaaaatttttatttttttttgagacagagtctcgctctgttgcccaggctgcagtgcagtggtgcaatctcggctcactgcaacctctgcttcccaggttcaagtgattctcctgcctcagactcctgagtagctgggactacaggcacctgccaccatgtctggctaatttttgtatttttagtagagacagggtttcaccatgttggtcaggctggtctcaaacccctgaccccaggtgatccacccaccttggccttccaaagtgttggaattacaggcatgagccaccacacccggttatgttccacccatatttaagggcagattatacgagggtgtaacacattggaagtcttcttagaattctgcctagtacagaggggtaagtcagtctgctgttcctagcccttgaattgttttccctaaacctggcctatacctttaaatggtccctcaattaaattctcttcaaattacccattggagtgctccatctgttcctgccaggacccttactggtaaaatccctctgcaggtgacctgctttgataatgtgctttcctgagtcttttttgagcctgggccagctggtggctggacttgagagagctcggactgagctaaactgcttagcattgcaaaggaaaaggtggcaatggcttccacttggctgcagccagggagagtgaatgaagagagagcagggccccacagcagagaaactcgtaacagataactaatggggaatctggggggtgaaatgctgagtgatacgcagcggaaaccttctcacagtctgtacatttcacattgttcgctcctgcctcaggttggcatcttctctttggggaacaaagggaagaacagagtcctgctttgaagctcgtttgaagcatgaacaaacggtgcctgtaaacaaccatatccggggtctatgtggcatctgagccgctgtgacacttgggagtcacactgctctctatcagcattttgaacactcatctttttattgtcttctttttcctttaaaaaaatgtaaaaacaaacaaaaagattaaacaaataagaaagaaaacaaaaacataaaaacagacttctcattttaaaaattatatcactttaggccggactcggtggctcacgcctgtaatcctagcactttgggaggtcgaggcaggcagatcacctgaggtcaggggttcaggaccagcctggccaacatggcgaaaccctgtctctactaaaaacacaaaaattagccgggagttgtggcgcatacctgtaatcccaggtactccggaggctgaggcaggagaatcgcttgaacccaggaggtggaggttgcagtgagctgagatcgcaccactgtattccaagcctgggcaacagagtgagactccaactgaaaaaaaaaaaaaaaaaaaaatatatatatatatatatatatatatatatataactttagaacattcactgtcatttttttttaaatgtgcttgttaaaaagtacaacagttcctagacaactggtcccaatgcataaagaggccctgtctgaagcttgaaaacttgccctattacttagcattgcacatttgcgattatttcattaactataatgcacaataatccagtgacctatcttcaaaggatccaaggctagagaagcaaaactactaacctaaaagcaaaatattttagaaagcagcccaaacaaggtgatggtttacatcttgcaacgttacatttatttgagtatttgagaagcataaaagcataaccttaaatcccatttaattgcatcctgaagaccatcatgtaagtcatcatggccattctcagggacagcatggaacagtggttctcaaaatgtggtccccagaccagaatcaccagcatcacctgggaagcacttgtgggcaatgcaaattcttagaccccgacccagacatgtgaattggaaactctggggctggacaaagtaatctatggtttaacaagcctccaggtgattcttacatactctatagatcgataatcactggctagaaacagaaagactagtacttaatgactttcaccagtgtgtgtaagggtagtgctctttaaacagacagagagagaaggaggtatcagtaacttgaaaactaaggttccttctcatggctatctgggatgtcaggcaagagcaaacctattgcaggcgctgtccataggttactaggcaacaccacctcttctccacaccaaatctctccattcttttcctttgagcttattttagtattcggttgaacagttttagttcagcaggtcgagattttgtaaggctcattgtctggggatggttcaggatacatgaaactacttttaaagggcatcttttaaaatgagcatttttttttcattttaattattgttcttcagaaactagaggttgagacagatgagctcttataatctctcccaattcagaattccataaagttcaaatgctactctaaaaattgctttaaatatgatgactttaaaaaaccagattaaccagcagtgtaatgttttctatttgaaagatttctcatgattgtttccagttactcctcctaatttctcttttgccaactctttcccacaagaagggaaaaaaaaaatctgtacatcatttgttcatttattcatgcattcattctattaactttggctgaggataaaaaatgtggcaggagatgcagaaaaggccttcaacaaaattcaacagcccttcatgctaaaaactctccataaactaggtattgatggaacgtatctcaaaataataagagctatttatgacaaatccacagccaatattatactgaatgggcaaaaactggatgtattccctttgaaaactggcacaagacagggatgccctctctcaccactcctgttcaacatagtcttggaagttctggccaaggcaatcaggcaagagaaagaaataaagggtattcaattaggaaaagaggaagtcaaattgtccctatttgctgatgacatgattgtatatttagaaaaccccatcgtctcagcccaaaatctccttaagctgataagcaacttcagcaaagtctcaggatatgaaatcaatgtgcaaaaatcacaagcattcctatacgccattaacagacaaacagagagccaaatcatgagtgaattcccattcacaattgctacaaaagaataaaacacctaggaatccaacttaaagggatgtgaaggacctcttcaaggagaactacaaatcactgctcaatgaaataaaagaggacacaaacaaatggaagaatattccatgcttatggataggaagaatcaatatcatgaaaatggccatactacccaaggtaattcatagattcaatgccatccccatcaagctaccaatgactttcttcacagaattggaaaaaactactttaaagttcatatggaaccaaaaaaagagcctgcattgccaagacaagcctaagtaaaaagaacaaagctggaggcattatgctacctgacttcaaacggtactacaaggctacagtaaccaaaacagcatggtactggtaccaaaacagatatatagaccaatggaacagaacagaggcctcagaaataatgccacagatctacaaccatctgatctttgacaaacctgacaaaaacaataaatggggaaaggattccctatttaataaatggtggctgggaaaactggctagccatatgtagaaagctgaaactggatcccttccttacactttatacaaaaattaagtcaagatggattaaagatgtaaatgttaaacctaaaaccataaaaaccctagaagaaaacccaggcaataccattcgggacataggcatgggcaaggacttcatgtctaaaacaccaaaagcaatggcaacaaaagccaaaatagacaaatgggatctaattaaactaaagagcttctgcacagcaaaagaaactaccgtcagagtgaacaggcaacctacagaataggagaaagatttggaatctacccatctgacaaagggctaatatccagaatctacaaagaactcaaacaaatttacaagaaaaaaacaaacaaccccattaaaaaatgggcaaaggatatgaacagacacttctcaaaagaagacatctatgcagccaacagacacgtgaaaaaatgctcaccatcactggtcatcagagaaatgcaaatcaaaaccacaatgagataccatctcatgccagttagaatggcaatcattaaaaagtcaggaaacaacagatgctggagagaatgtggagaaataggaactgttttacattgttggtgggagtgtaaattggttcaaccattgtggaaggcagtgtggtgattcctcaaggatctagaactagaattaccatttgacccagcaatcccattactggatatatacccaaaggattataaatcatgctactataaagacacatgcacacgtatgtttattgcggcactattcacaatagcgaagacttggaaccaacccaaatgtccatcaatgatagactggattaagaaaatgtggcacatatataccatggaatactatgcagccataaaaaaggatgagtttatatcctttgcagggacatggatgaagctggagaccatcattctgagcaaactatcacaaggatagaaaaccaaacaccgcatgttctcactcataggtgggaactgaacaatgagatcacttggacacagggcggggaacatcacacactggggcctgttgcggggtgagggactgagggagggatagcattaggagaaatacctaatgtaaatgatgagttgatggttgcagcaaaccaacatggcacatgtgtacctatgtgtcaaaactgcacgttgtgcccacgtaccctagaacttaaattaaaaaaaaaaaacaacaatgtggcaggagtgcaatagctgatggttatacaagcagcttccaacccagtaaaggggaaagacatggaaagagatcaccacagaacagtgtacgaatgcaaccactagaataggcccagtgtattcccagagctcagagtagtgaccttgaagatgaagccagggaagccttcatggatgatgtaagtaggtgttatggagtgggagagggagggaaggcacagaggtgagaaaaggcctggcaaatgcagatgaatggctgcagtccatagtcagaagcaggaggtgtcaatagtgaggtttgtagggacctgattgatgaaggagctgaaggagatgggcagccactgaagaactaaaagcaggaaggatatgattatatttgcatggaaggatttcctcttcagcagctgaggaagaaattagggagccgggcatggtggctcatgcctgtaatcctagcactctgggaggccgaggcgggcggattgcctgagctcaggagttcaagaccagcctgggcaacatggagcaaccccgtctctactaaaaaaaaaaatccacaaagtagctgggcatggtggtgtatacctgtaatctcagctactcgggaggctgaggcatgagaatcgcttgaacccaagaggcggaggttgcagtgagccaagatcatgccactgcactccagccggggcgacagagcaagactctgttaaaaaaaaaaaaaaaaggaagaagaaattaggagatgatagcactgagcaagacagactgctgaggatgaggatgctgacacagtggtccaagagagaatgacatagacttggactgggacattggtaatgaggatagagaaaactggactaacttgagaaatacccaagaggctaaacaggcagaactgagtgattccttgggtgttgataatgaaggacaggaaggagtttagaatgaaacccaatttctaacctagtgataggtggtgtttccactggagattgagaatactggaggaagagatagtttaggttctgttttggtacatgtgagatgtttatctatccatctagtaggaaataggatatatgagttatcttcttaaggaggaaaataaaagttttagagtaacagatttgggagttgtcaatgtagagataatgttgaaacaatgagtgagtgtggaaaacatcacccagataaaatgtaacaaagactggggtgggggattaagccttgggggaccttggagtttaaggagttaaggagtgagtggaagaagataagcccataaaagagagaatgataaatgtcaggaagaatcaaaagattcataaatgtcaggaaatgtaaaccagtaaatgtcacagaagtcaaaaggaacaaatgtttcaggaaggaaggataagttagcaatgaacaatgtctccaaaagatacaagaagttggctgaaaaacactcacggcacagagcaattaggaagtcattggttgtctttaaggagcatatttttaatagaaaaaagaatgcaggggtttgtggggcaaaaggaagttgaaggggagagagagaatgtagacaactcttcggagaagagagaagctgggcagagattattttctttttaaatgagtgaggctagaataatttgtcatctaaagcaagatactcatgagagggaaatgatgaagaaaatcagagaaataaagggccagagcaaaatctagcaggagaaggagtggtgccacagaaatggtgaaagcaagtaaagacatgcactatccatagctgcctggaggaaaggatgcaggagcaggcaagcagaagacagactcaaaagcctaagaaggagacagtgaggaggaatagtcttgggggaggagtggggaggaggaataaatgctctgaagggctgccttgcatactgtggaatctagtgcaacacacaagctcaaagccagatataggctcagaataaatcatacacttgcacctctggctgttctttgggctccacacaagcaggaggtaaaggctaaggcacagttgagggagcaccccagccaatatgcaaagaccaatggagttgcttttatttttctttttggctccaggcattcaaggaaacctctgtcaggtcactggctgaccactgaaataatagaacacagacttcagtgactacgcaaacaaagaacatggtctgtacaaaaatagtttggaaaagtcactaaacaaacagattactgcagtcctcaacaatcaacaacagcaaaccctggggagaacagaaagtatgctatctagagttaccacagtataatattcaaaacgtccagttttcaacaacaaaaaatacaggcatacaaagaaacaggaaagtatggcccatccacagaaaaaaaaaatagacaaaacccatgctagaggaagccagacattggaatgactagagaaagagtttaaatatataaatataacatattaaataatataactttaaatatcaaccaccttacatttgctcaaagacctaaaggaaaccaatagatgaacaagtaaaggttatcaataaagaaatgtaaattgtaaaagaaaccaaattttaaacaactggagctggaagttcaatagctaaaaaaaaatttactagagggattcagtggtatatttgaacaggcagaagaaagaatcagtgcacctgaagataaaataattgaaattatccagttcgatgagcataaagataaaagaatgaaaaacgaacagagcttaagagacttgtgagataccatcaagcacacaaacatgaaaaagagttagaaagacatttgaatggccccaaagtcccaatttgatgaaagacataagtacacatccaagaagttcaatgaactccaagtaggataatcatgaagagatccacactatgataatcaatcatatttataatcacactgtcaacatccaaaggcaaagagataatcttgaaaatggcaagagataagtgactcataatgcattgattattcaatatataccccaataagactgttaatgtaataatcatcagagacaatgacagccagaaagcagtataatgacatacccaagtgctgaaataaaaaaaaaaaaactgtctagtaagaattctatatcaagcaaaattgttcttcaaaaattaggaagatatgggctgggcatggtggctcatgactctaagtgatcccagcactttgggaggcctaggcaggtggatcacttgaagtcaggagttcaagaccagcctggccaacatggtgaaaccccgtctctatttaaaaaaaatgcaaaaatcagccaggcattgtgatatgtgcctgtagtcccagctacttgggaggctgaggcaggagaatcacttgaacccaggaggcagaggtcgcagtgagccaagattgtgccactgtactccagcctaggcaacagagtaaaactccatctcaagaaaaaaaaaaaaggaagatattaaaacattcccaggtaagcaaaagctaagggagtttgttgcccctagacttaccctgtaggaaatgctaaagggagtcctttgggcagcaatgaaaggacactagacagtgagttgaagttgaagtcatctgaagaaataaagaactctggtaaagatagctacataggtaaatataaaagccagtattattgtatttctagtttatacttcctatttttgattcttatgattcaaaatacaatgcatcaaacaataattacaaatctatgcagtaggcacatagtgtataaagatggaatttgtgacaataacaatataaggtgggtacaaagctgtataggataaattttatatgctatagaagctaagtttggatcatttcaaacaagcaatggtgttataaatttaggatgctaaatgaaatctccatggtaaccatttttaaataacttttaaaattacataaaaggaaacatggataaagtaaaaatagtccactagaaaaaaatcaaacacagaagaaggtagtactgaagaaaacgaggaacaaaaaagataagacatttagaaaataaatggctaaatggtagaatataatgactcagtaatttaatgtacaacatatatttaacatataattatgtatattaatataaatatattaaataatataactttaaatataaatggattaaactcactagttaaaatacacagactggcagactgccagtgaaactattcagtgcaatactttaatagtggatacatgtcattatacaattgttaaaactcataaaatgtacaacacaaagagggaagcctagtgtactacattaacgtaagatggtaacaataggagaaatggtgtgtaggggcagcagtaggtatatggaaactctctgtactttccactcaacttttctataaacctaaaacttctctaaaaaaataaattctattaatttaaaaatgtttcaactatatgctgtttataagtgactcactttagctctataaggttggaagtgaaaggatgtaaaaagagattctatgcaaatggtaactgaagatgagctggggtatctatactaatatgaagcaaaagaggctttaagtcaaaaatgattaaaagacacaaaaaggtcattatatattgataaaagggtcaattcatcaagaagctataacaactataaatatatacccacctaataacagagctccaaaatatgtactacataccttgacagaactcaaggaagaaataggcagttctacagtaatagttgaagacttcaatgtcccaaccttcaataataaatagaacatctagacagaagatccataaggaaacagaggacttgcataacactataaacaattaggcctaacagacatatatagaccatcctatcaaaaacagcagaatatacattcttctctaggacagaccatatgttaggccacaaaaaacagtctcaataaatttttaaagattgaaataatagaaagtaccttctcagatcacaacagaacattgttagaaatcaactacaggaggaaaactggaaaaaaaaagtgcaagtacatgaaaaagaaacaacatactcttaaacaacaaaggggtcaaaggataaatagcaagagaaataagaatactttacaataaatgggaaaaatccccaattcttatacagaaaaagcagtgtccagagggatatgtgtaagtatagatgcctacattaaaaaaagaaaagaaaaatctcaaatctataacctttaaggaactagaagaagaaagcaaaccaaatccaaagccaacagaaggaataattatagcagagattattgaaatagacaataggaaaataacggaatcaatgaaactagaagctggttcttcaaaaagatcaacaaaactgacaaaccttttgctagactgactaaaaaagtagaagatgcaagtaactaaaattaaaggtgaaagtgggtgtattactaccactgttggtgaggatgtggaaaaattgaaacccttgtacattgcctgaatataaatggttcagccactgtggaaaatattttggtggtttctcaataagttaaccatagaattaccatatgatccagcctgggtgacagagggagactccatctcaaaaataactaaataaatagatagataggtatgggattttatttgtgggtgatgaaactattgaaaccagatagaggtggctgttgtacaacattgttagtgcgttaaataccactgaattgttgacttcatttatttttattttttttgagacagagtctcactctattatccaggctacagtggtgtgatctcagctcactgcaaactctgtctccgggttcaagctattctcatgcctcagcctcctgagtagctgggactacaggtatgtaccaccatacccggctaatttttgtatttttagtagagacaaggtttcgccatgttggccaggctggtcttgagcaactggtctcaagtgatatgcccacctcagcctcccaaagtcctgggactacaagcatgagccactgcacccagcttgaattgttgacttaaaaatagttcattttatgttatattaattcaacttcaatttttaaaaaatcctgcaggtgctgaaagaataggtcagaacataggtagaaaagttgaccttaaaccaaaaagggagaagacagattttagaacactgtgtagtaggaaagggtgagaaattgaaggaaacgatttttgacaatggcctcaattttctcaatagagtaaaaagaagagccacatttattgaactattacaatgtgtcaggtacagatgtataatctcccttaactatcataacaacctagtaaggcagatgcacttgtttttcccaattaatagataagggattgactttgaggaattaagtgactggtttaaggtaatataattagtcagggtcaaagtcagcatttaaacttctgcagtctgactccagatctggttgtatcaaactttgttccttgataccgccactcttgaggccaaatggttgaacctagattgggttagaagtggtggaaaagaatcagagaagaagccagtcaagcaaggtcaagtaacacgggtgatgacaaaagctgagggtccaattgatgccttcgcacattcatcaacaaggtgtgattgcgtgcctaccaagatgcatgtgaacctgcctgctggtgtgatttttctctggcagcactcagtctcctgagagtaggagaggagaaacttatcagaatgattgacctgtgtttgcattttcactgagtgggtttggtagaagacaaaagtacaaaaaacttgacaggaggccaggaggggatcaatagattcaactgtggggtttgtgaggttgacagccaggcatggaaggaaggaaggtgggaaaagtctggaaaaagagaaggttatggccaaaagctggatgttgatgtttatgattggttttagacaggggtatttcctagtgaggacagggccaggacgtgcccataggaataggtggctgacgggaagtccttgggcctgagaagattaagacttgggaggctctgaggcaggagggtagcttgagaccaggagttcaaaacaagcctgggtaacatagtgagatcctgtctctacacacacacacacacacacacacacacacacacacacacacacacacacacagacctgtgaagctagcacattggattgggcaaccatataaaccttgaaggtaccaaaaattaggacaggacttgggtggaatcagctgccacagtcttcaatgactattgaggagtggccaagttgtcagtgcaaggcagagatgaggaggataaatagcttaatggcataagtcacaaagggacagagatttttagaagatgatggtggtataattgcagtggagaccaaaaataatgcaaacaagccacttccaacctctgacaaaaggtgtagacaaaaattagttttattagactgagagtggtggcttgtgcctgtaatcccagcactttgagaggctgagatggaaggattgcttgagccagtgagtttaagaccagcctgggcaatatagtgagactttgtctttacaaaaaaatcaagaaaaaattagctggggatagtggcacatgcctgtagtcccagctactagggaggctgaggtggagggatcgcttgattggttgaggctgcagtgagccgtgattgtgccactgcactctggcctgggcgacgagtgacatttgtctcaaaaaaaaattggttggtgtacttgtgttaccataaagtctcactgctgctataataatcatagtactgatagtaatattaataacaacaaaaatattatgttataaagtgctcttgaaaataagttggaaagatgcttagtaaattcatgctttaagaaatcacagttgggtgtggtggctcatgcctgtaatcccaacactttgggaggccgagacaggtggatcacttgaggtcaggagctcgagaccagtctggccaacctggtgaaaccccatctctactaaaaatacaaaaaattagctgagcatggtggcaggcgcctgtaatcctagctacccaggaggctgaagcaggaggattacttgagcccaggaggtggaggttgcagtgagccgagatcgcgccattgcactccaacctgggcaacaaagcgagactctgtgtcaataaataaataaataaataaataaagtcactgagtgggtatggtagaagataggaacacaaagaacttgactatatgccacatactctgcttagtatattatctgcattatctcatttaactatgtcagtgatcctatgaagtaataattctattatcagctcaaatttacagatacagaaaatgagactaggtgagattaagtaacttatttcaggttatacagtggcagagcctagattccagcccacatctgcctgactctaatactcttaaggcccttctattaaacatcagggaagaatctgggtttatttgctcaaactggaaagtgccaaggttgaataattcttaactaacaccttagcagataggaggctctctttggtttacaactccaattccctgaagaaatctaattcttcagggaaggctgaaggcaatagaagacgctattgccccagcattaacttggtttgccttgctttattagaatcttctgaaagcacgaatttactaaacgtctttccaactctattttcaacagagctgtgagccaccgtgtgctttgtcatgccgagctttcttctccagaaaagacattcttctaatctggggggagacaaatgataagtgaagtagttccaaggctcaacaaagtgccatagagtgactcctgtgagagaacagaccaaaacgattggaagtctctggtctagatacacgaaggcagatgagcactgcggaagggtgccgagattgtccactgctcaggacaaggaaaagcaagacgctggcttgttcactgtcataggttgaatggtggccccacaaaaccgatgttcaagtgctaactcaaatgtgatcttatttgaaaatcaggtttttgtagttgtaattaagaatctggagatgagatcatcctgcatttatttatttatttatttattttgagaagtagtttttgctctgtcatccaggctggagtgtagcggcacaatcttggctcactgcaacctctgcctcccaggttcaagcaattctcctgtctgagcctcccaagtagctgggattacaggtgcccgccaccctacccagctaatttttgtatttttagtagagatgggggtttcaccatattggccaggctggcctcgaactcctgacctcaggtgatccgcccatcttggcctcccaaagtgctgggattacagacatgagccaccacgcccggccaactctgcatactttaatatttccataccatattcagcttattgtacagtttggactgtcaaagctatgcacattttaagaataatttcttgagggcaggttaattctggtgtgtgttacagtccttttgtaatttcagtaatttcctgagttgcagaggcctaactgaatcaatgttaggcatcttgatggaaaataatggtgatggtttaggagagtgaggaaaaaaagattttccaactcaaaatcctgataaaaacatttggagaggtgggtatactattgtataaaaatgtttagggccgggcgcgttggctcatgcctgtaatcccagcactttgggaggccaaggcaggtggatcacctgagctcaggagttcaagaccagcctggccaacatggtaaaaccccatctctacaaaaatgcaaaaattagctggacgtggtggcgtgtgcctgtaatcccagctactcaggaggctaaagcaggataatcgcttgaacctgggaggcagaggttgcagtgagccgagatcgtgccactgcactccagcctgggcaatacagtgtaacttcatctcaagaaaaaataaattaattaatttaaaaaataacaaaaaataaatgtttagataaagaaatctaaacattatgtgccatataacatttcaatcaatgatgaactgaatatacaacagtggtcccagaaaattataatactctatttttactatactttttctgcattcagacacacaaatacttagcattgcattacagttgcctacagtactcaatgacatgctatagaggcttgttgcctaggagcaatagactagaccatccagcctaagtgtgcagtaggctatgccatctagccttgtgtacgtgctcgctgtgttgtttacacaacaaaatcacctaatgacacatttctccaaacgtatgctcatctgcgctaatgaacacaggaaagaaggcccgggaatagccttgcagaaaggacctggctgtcagcctgatgcactgtgcggctggccatctcctggcagtccaagggctcaggctcagtttaccctccaggcagtagacaacaagcttccctgtccttaataacaccctgcatcccacctcccagtctctgcaaaatgcttgagcaaggcatttggtcctaagaagttatctcactctgggcagccatacagctattacttatggtgtcatttcaaggactgatgaatgtcctggaccccaaaatgactcatcaccgagtagtgttatcttaagggagaggcttctgcccttggggcagctccatggagacttcagttaaactggctgctgagcaaggcgctgatgattcaaattgcaactgtttttctgtttattttaagctcaaaataaaaaaaatctctcgagtgggttttgcttatttgaaaactgtaaaaggtactccagtctccccacatggcagcttcaaggccctgaaggctgtgcttaactgcaggccctggcttggcttctggtcaagtcatcaagaagcttctagaatttaagatggcagttcccttatcagatccgctctgcgaatatacaggagggaggctttgtggccagaaggcaggttgggttgtaagacctgtttaatttctctcaggaaaaaatacaacagtaaacaaaacaaatcctgagtactggcaacaagaaaaaccagctttctgcctagaaatgtttactcttttacaattgtagaacattcaggaaaatcatggactccaaataaaaaacccaacaaataaaaacacttccagtcacctcctaatttttagaatgattggaggagatagatgaatgattaaatgagtgattaaaatgggattaattattataattaatcaatgaaaacatgatcacacccagcttccatcctggatctagctggcaagatcccaattttggaagcaggtaaaactcggaagtctttattacaaatgactgattccatttactccaaatatgagattctaatgtcaccctgggatagagaaaccctctaactgcacaaagtctgtaggttaacagtaaagccaggggaccaggcccagtggctcatgcctgtaatcccaggacgttgggaggctgaggcaggcagatcacttgaggtcaggagtttaagacccggctggccaacatgatgaaaccccatctctactaaaaatacaaaaaaataaaaattagctgggtgtggtggcacatgcctgtaatcctagctactctggaggctaaggcaggagaatcacttgaacctgggaggcggaggttgcagtgagctaagatcacactactgcactccagcctgggccacagagtgagactccttctctaaaaacaaacaaacaaaacaaaaacaaaacagtcaagctagggacctaatgattggagggaaaggtctccatattccttggggaaatcggctttatttagacatgatgttccctctgtaaatgactctcagctggccttgggcctgctcttcaactctctccacgttgttaagtgtagaatctaagtttcccatcacgttccttagatgtagagtgtctgttattccaggaaatctctttgattaaatggcaaatgtgctgggagtggtggctcacacctgtaatcccagcactttgggaggctgaggcaggcagataatgaggtcaagagatcgagatcattctggacaatatggtgaaagcccatctcctctactaaaaatacaaaaattggctgggcgtggtggtgtgtgcctgtagtcccagctactcgggaggctgaggcaggagaattgcttgaacctgggaggcagaggttgcagtgagccgagatcgtgccactgcactccagccgggcgacagagtgaaagtccatctcaaaaaaaaaaaaaaaaaaaaaggaaaacaaaaccatgccaggcaggtccgcactttacaaacactcaactgatccttgacctttcctcagcccccttccaggctccctccacctccaggctttcgccctccagtgggaggggctgccgccaccactgggtcctcccttgtacctaaattcctctccaccccaggccctggagagctgcagttactgtggtaacactaaggaacatcctagcatttgtgggctagcctacacacctactgaccatgactcacattatttttatgggaaaataccttctgagttttaaccaacaattcacaatctgctcttgaatatgtctattgcttttataatgcctcctcttcttggcatcctatggaaatgaattttcataatcatcaaaatgaaccagtgaaagggctgagcttagggctgcaaagtactataaaccttaaaaacaaagcgcatcagtgttatcgctaggtaaaacagtaaggtaaactgcagatctcggataagtcaaatgggctttcagcgttctcaactgtaaaatgggactgtaaaatcaatgagatcaggtgaaaatgctcttgaaattgtagggtgataaataaattcaattattattatctatattgcatttgttttttatttatttatttgagacgaagtcttgctcttttgcccaggctgaagtgcagtggcacaatcttggctcactgcaacctctgcctcctgagcttaagcaattctcctgcctcaacctcttgagtagctgggattacaggtgcgcgccaccaggcctggctaatttttgtattttgagtagacggggtttcaccatgttgtccaggctggtcttgaactcctgacctcaggtgatctgccgacttcagcctcccaaagtgctatagtgcatttataagagcaaagactagagaaggtcatccttggttcaaatcctggctttgaaccattctattctatttacactattaaccattcattctatttgaactattctagctgtgtgaacttgagcaggttacctaagtgctttgtgccatacaacagttgcccctcagtatccatgggggattatttccagaaccccctgcagataccaaaatccatggatgttcaagttcctgataaaacgctgtagaatttgcatataacttacatcttctcctatactttaaatcatctctagattacttatgatacctaaaacaatggatgtactatgtaaatatttgctatactgtattgtttagggaataatgacaaggaataaaatctgtacatgttcagtacagatgcagatttttcctgaatatttccaatctgaggttggttgagtccacagatgcagaacccacagagagggccaactatattatcctcctgtaataacagtaactctagaaaacgatggttgtgaggattaaagtattaaaaaatgtaaagtgcttggacatatgaagcgctatgtaatgttggcaatgagcagcagcagcatagcctaacagaaagacagtggcctggaaaaacagtagcctgggaatctgacaggtctaagtggatggggatgtcttgtattgttgtaattacatgcagctgctttattggtgactcaagaggaaacttggtaattattttaaatatttgtttcttttggctgaggcatcactagatacaactgtgaagtagatgaatgattttcttcataatttgctaatctatttttttaagttcacagccgcggtggcctccagcctgaggattctcctgatacatgctactaagggctcacctgtgcttgccttctccctgggagctgtcgactcacagttaactctgtaggttgaatacatgccatctgctctactccctgttcaaagccactcagccataaaggaataaaataggaagaagcgaatggcaatggagatgcaaaaagtgtcaacaatattttggaagacataagttgtttggacaaaagacttcgaatttaacgtcagctttctccattctgctgagtgtctatacctgaagaagccaataaaagataaattgaatccggcctggggtggtggctcatgcctgtaatcctagcacttggggaggccgaggcgggtggatcacttgaggtcaggagttcgaaaccagcctggccaacatggtgaaatctcatctctactaaacatacaaaaaaaattagcctagtgtggtggcatgcacctgtaatcccagctacttgggaggctgaggcaggagaatcacttgaacccgggagttggaggttgcaatgagccgagacggtgacacagcactccagcctgggcgacagagcaagactccgtctcaaaaaaaaaaacaacaaataataaataaatacaaataataaataaataaataaattgaatccactatgaatcctccaaaatctcagaaactggaagcactagacatctctgaattcaggggattaggatggcgctgaaaatgacagaattcattcaatgtctgtgtaagaaggagctggacctcagctcttcctcctcactccacacagccagaggctgtcactcctctaccacccagcaggtgacagaagatttgctctctgaagagggcaaaccagagatgtcctgatccaggagacatgaggcatcacagagggcaagaaaacaaggcatttctgaaatgagtaaggctctcagaagtcacatatgacgggccattgtccccattccacccccaagatgccacactagctcactgctttttctgtgcagggtgacagcattgcagaactctagggaactatcattccataaactgcaaggtcaagggtgctccctgtatcgcctgggggaactggttagcttaagagaaaaagcaggtactccgcctgtcatctcacagtgaggctaccagttgacaagcctcgtgcacatacactgaaattctgataagtaatttggtgaatggccaaggatcaccagaaatttgaggaaggcctctactatgaagaaggccagagatcaaaacaaaagcagaaaaagagcccagaaaaaacagatggtgcaggaagaagatgacttcagaaaaacaatgattaatatcttcaaaagagaagagaagagaatgtatccatggcacaattacatcattctatgaaaaggaaaaaaattcaaagcatatgaaagaattcttaaaaattaagaataagatgtactattatccacacaatggaatattactgaggtataaaaagaatgaagtactgatttgtgctaaaacacaaatgagccttgaaaacatggtgctcaatgaaagaagccagccacaaaggaacatatgttgtctaatttaattacatttacatgaaatgttcagaataaggcgagtctgtagagatggaaagattagtgttgttttgggctgggggaaatcgggagattggagggtgataaataaagggtatgggttttctttagggtgatgaaaatgttctaaaactgagggtgggaacagttgtacaactctgtgagtatactacagaccactgaattgtatacttttttttttttttcacagtctcatgctgccacccaggctggagtgcaggggcacgatctcagctcattacaacctctgcctcctgggttcaagcgattcttgtgcctcagctcccaaatagctgggattacaggcgcataccaccacacccagctaattttttgagggtatttttagtaaagatggggtttcaccatgttggccaggctggtcttgaactcctggcctcaagtgaccctcccacctcagcctcccaacgtgctgggattacaggcgtgagccactgtgcctggccaatttttatactttaaatgggtgaattgtatggtaggtaaattatatttggccgggtgcggtggctcacacctgtaatcccagcactttgggaggccgaggcaggcggatcacaaggtcaggagatcgagaccatcctggttaacacggtgaaaccctgtctctactaaaaataattggttttatttttatcacataatgggtggttagcagatatagggtctctatgttgttaccagagaaccagattatttctatctttgagcttagacatcattagttttgctctcatcctcacacaaaatgttttctgcccattctcttcccatctcaggcattgcaagtatgtttcaagcaggaaaaagatgggaaaatttgtgtcaactgtaacttcaacttacagctcattggacagaactgtgtcacatgacttcatctaccaacaagatggctgtgaagcacattgccatcctgcatagagatatgctgttactaagaaagaaggaaaggtgtattcagtagacaattagagatctcaactacagaaataaacagtttcccaagaactagaagatggccccagatttaaagggcccattagcacctagaacgaagaatgaaaaaagatccacaataagtcataaccctgtaaaatttaagaacaccaggccaagtgcagtagctcacttctgtaatactagcactttcggaggctgaggcaggaggatggcttgagcccaggagttagagactaacctggacaacatagtgacaccctgtccctacaaaaaaaaataccccaattagctgcgtgtggtggtgcatgcctgtagtcccagctactcaggaggctaaggtgggaggatcacttgagcctgggaggtcaaagctgcagtgagccatgattgcacgactgcactccaaacctgggtgactgtctccaaacaaacaaacaaacacacatagttttttttttttaatctaaaagctttcagagagaacaagcaggccacatacaaggatccagaatcagtactcattcctttcaatagcaacaccgacactatctcagcagtatagtaatcacttaacgtcttccataggttctctgaaactgcgactttaagcagaacaacatataacctaactaattttgccataagctaattgatgtaaacaagaattaagttcctatggcatatttctggccccccagatatcaccagactttttttttttttttttttttttgagatggagtctctctctgtcgctcaggctggagtgcagtggctcaatctcagctcactgcaagctccgcctcccgggttcacgccattctcctgcctcagcctcccgagtagctaggactacaggcgcctgccaccacgcccggctaatttttttatttttagtagaaacggggtttcaccatgttagccaggacagtctcgatctcctgacctcgtgatccacccgcctcggcctcccaacgtgctgggattacaggcatgagccaccgcgcccggcctcaccagacttctaaataaagaccccaaacacttctaatattaaacattgaaataaatataatctatatatacatttaagaaggatgaataaaaacaagcaagataattatttcccactttcaggtgaatcagtgagggacgatggttgttgtggtggtgggttaaatcagggaataactatttgcaaagtggaaattgtcaggagcacctcctgccaccatgtagctcagaaacaaacaagaacaaattccacgggctctctgagcacttttgtaccacgtcatttatttgtttgtttgtttgtttatttggagacagaatctcactttgtcgcccaggctggagtgcagtggcacagtagcggctcactgcaacctccacctcctgggttcaagcaattatcctgcctcagcctcccaagtaactgggactacaggcacccgtcaccacgcccagcaaatttttttatttttatttttatttttttgagatggagtctcactctgtcgcccaggctggagtgccgtggtgcaatctccgctcaccccaacctctgcctccccagttcaagcgattcttctgcctcagcctcccaagtagctgggattgccagcatctgccaccatgcccggctaatttttttgtatttttagtacagatgaggtttcatcatgttggcgagtctggtcttaaacttggcctcgcaaagtgctgggattacaggtgcgagccaccacacctggctgtgtatttgtttattgctgtgcatttgtatgattatcacagactttacaagttttatttgacaatgatttgtatccatcctgttatggtttggaaatgatttgtttgtccccaccaaatctcatgttaaaacttgatccccagggtggtggtggtggaggaggggtctggggggaggtgtgtgggtcatgggatggaaccctcatgaatggcgtgggctggtctcagggtggtgagtgagttctcactctcatgagactgaattggttctcagcgggatggattggttctaatgagagagggttgatataaagtcagcacacccccaggtatgaatccctcttcacgtatgcctgcttcccctttgtccccctctgccgtgttttgacatagcacagaagccctcaccagaagccgcgcagaggccagcaccatgagtcttatgcagcgcgcagaactgtgagctaaacaaacctcttttctctaaaattacccagcctcagggattcctttataaaaacacaaagtagactcagacacattcatttatttatcatctaagtcactgactccagttcaggatcaagggtggccggagcttttcctggctgcttagggcacaaggcaggaaccagctctggactggacgccatcccattcctgtgtgtgtgtgtgtgtgtgtgtgtgcaggagagtcacttgaacctaggaggcggaggctgcagtcggctgagatcacgccactgcactccagcctgggtgacagagcaagactctgtctcggaaaaataaataaatacatacatacatacaaaaattagctgggcgtggtggcaggcacctgtaataccagctactcaggaggctgaggcacaagaattgcttgaacctgggaggtggaggttgtagtgagctgagattgcgccactgcactccagcctgggtgacagagtgagactctggagtcacacacacacacacacacacacacacactcactcactcattctggggccatttagacacatcacttaatctaatgggtacattcttgccatgtgggaggaaatcggagtatctggagaaaacccacacagacatggggagaatgcaaaactccacacagacagtggccccaaccaggaatctattttttttccttataaatgttataatgtggctgggcatggtggctcatgcctataatcccagcactttgggaggccgaggcaggtggatcacttgaggtcacgggtttgagaccagcctggccaacatgatgaaaccccgtctctaccaaaaatacaaaaattagctgggtgtggtggcgggcgcctgtaatcccagctactcgggaggctgaggcaggagaattgcttgaagccgggaggcggaggttgcagtgagccgaaatcgtgccactgcactccaacctgggcaacacagtgagactccatctcaaaaaaagaaagtaaataaataaatgttataatgagatgacgttgaacaaaaccatgttcttcgaggacctgctgtaacttcagaacctgaggaaaattttcatcctagaattctccattaggtagtaaatttgtgtacatcatgaaagttgttgattaatgtgtagttttgtcaaaatgtttcttgacatttaccatccaccctgggagctgtcatcctatcactagccatgcaaaacccagaaggcacagacctgctgacgaaacatcagcatctctttcagaagttaggacttactttaggaagttattttaagtagttattcccaaagacaacaatttgacttttgcaactgtcatttacttttcattccatgaagtttgaccttttttggagacagggtctcactgtgttgcccaggctgaagtgcagtggcatgaaaatggcttgctgcagactcgaactcctgaactcaagcgatcctcccacctgagcctcccaaagtgttgggattataggtgtgaaccaccaagcccggccgactttttgtttatatcaaataactgttcgcctaagttaattttgcttttttattccaagttttcttacagatacaaaaaaatcaagcaatagtcgttttgtattttattttatttttagagacagggtctcactctgttgcccaggctggagtgcagtggtgacatcatagctcattgtaaccttgaactcctgtgctcaagcagttctcctacctcagcctcccgagtagctagggctacaggcatgggccaccatgccaggctaattaaaaaaaaaaatgtttgtagggaatggggtcggggagggggtcttgctatgttgcccaggctggtctcaaattcctggcttcaagtgatccttccacttaggcctcccaaattgctgggattacaggcatgagccattgtgcctgctgatagctgtttgtattggctccattagcagcagtagaacttagcaaatggttaatgaaagtagtttgataatgtcatcagatgtttcaaaaagaaaagcagtttagcccaataatggccttttttttcatacaattaattcctggaatcaatatatggaggttcattctgccaaaggtgaaatatctgacatcattgctaattctattgtaaactcggcttttaaaaactggttaaaattaaaaactgattccaaattaaaaggatttctcttttgcagggataatagaaatacgatttttggaggagcaatgcactacgggaaaaataacgcgctcttaatactgttaagaaaccaaatggtcttggcaatgatttcttggatgtgacaccaaaagcacaggaaacaaaagtaaaaatagacaagtgggactacatcaaacaaaaaagcttctgcacagcaaagagaaccactgacagagtgaaaaggcaacctacagaatgtgagaaaatatttgcaaaccatatatctaaaagggttaatatccaaaaatatataaggaactcctacaactcaataacaaaaaattaaataacccaattcaaaaacaggcaaaggacttgaatagatacttctccaaaggagacatacaaatagtcaacagttatagaaaaagatgcccaacatcactaatcgtcagggaaacacaaatcaaaaccatgaaatatcacctcacgcctattaggatggccatcgacatggtttggatctgtatccccagccaaatctcacatttttttgttaattagccaggtgtggtggcacatgcctgtagtcccagctacttgggaggctgaggcaggagagtcacttgaacctagtgtagcaggacaagtcgcagacaaaactcctcagacacaagattaaagaaggaagaggttttttattctgctgggagcgtcggcagactcgtgtcttaagagccgagctctccgaaaaagaaattcctagctcttttaagggcttacaactctaaggggtctacgtgaaaaagtcatagtagatcaagtaagcgtgagaaacgtgactaggggctacatacatcagctaacagaacaaaaagttttacagtgctttctcatacaatgtctagaatttacagataacaccagtagttttggtcaggggttaataatattattattattttagccaccagggccaggtggtggtgccaaggtcgtctaactatgtatcttacttctgtttctttccaacttttttgctttctcccttttctcctgtcttataaactagggaaaaggggaggttggggagaaactgagaaggccaacaggagaagtggtggcctcataccatactaggaggtggaggctgcagtgagctgagatcacgccactgcactccagcctgggtggcagagcaagactctgtctcggaaaaatacatacatacatacatacatacatacatacatacatacatacaaacatacatacatatgtacatacaaaaattagctgggcgtggtggcgggcacctgtaatcccagctactcaggaggctgaggcacgagaatcgcttgaacccgggaggcagaggttgtactgagccgagattgcaccactgcactcctgcctgggtgacagagtgagacaccatcttaaaaaaaaaagaacgtccccttgcctgagtaagacctcactagacacacaacaatgtgtattttaggaccgcatacacacgtttaaaggaaactcatgcaacaatcagtgtctcagtcagggccgaaagccgagagtcatgtgatagtgtcttaaaagctggccgaaacagaaagaagtcccacgaagctgcatttatattttccaagttaattaaatttatttaatcagttgtttcggagctagttttcccttcaggattggtagcccatgacaacagacagagagaagacaaagaaacagctctaccaggtggcaatatggttgtgtttctatacaatttatgaatgtttaaggtctcctgggacccctttatttccttagaatataattcctctcccctgttcctgagcaattctagccatttagagattttatttctatcttctcattttcccttggtcccatgaagccaaattggcatcttgtaataaattcttgtgtgtttacatttctttcactttattttatgagttaagagactgaatcgagaggttagctatgcatcagtgatgaaataaccaccaacggctgcttctcagacaattttagccaccattctattttctgtttcccaggttttcaaccttaaaaccatcctcacacccctctgctcctgtcgattctcctactgcacaattttgaccctcttttctgctcttttatttctactcccactgccctggttcaggtccttgcaactcctccccctattctctgtttcctctctttgccagtcatcctgagtgcatttcctcattcattcattcattcacttggtatcagttattgaatactcactgtgtgtgtcaaacaaagcagcgagatgagtgtctcttccctgtgaaccagccacggctgggatgtgccttgaattcccccctagagcctggatcttgcctgcgttttctctgggacactccttgcatctttcttgaagtcctgtcccagcttcaaggtttcggttccccagatgccctcattcacactctcgccttgccctgttctccactgggcatggtggtcccctttcatgtaaattgcatcatagtagtgcatcctctgcattactggggtacacagtgggtctgcttcttggcaaaattgtgtgccctggatttgacatggtatttatcatgtggtagttcctccagacatacttctagaatttgctggtagtgaaaggattctaaaaggtacaataggcggggcgcggtggctcattcctgtaatcctagcactttgggaggctgaggcagatggatcacctgaggtcaggagttcgagaccagcctagccaacatggtgaaacaccatctctactaaaaatacaaacaataagccgggagtggtggtgcatgcctgtagtcccagctactcgggaggctgaggcagtagaattgcttgaacctggaaggtggaggttgcagtgagctaagatcccaccattgtactccagcctgggcaacagagcaagactccatctcaaataaaaaaaggtacaatagtactatgttcaactctaaggtagcataaaggtcactagaaatactatgtcttgagagaaaataatatgatggcatatgtttattacagcacttcagtggctgtcatgtggtgtgcctatagctccacctgtttgggaggctgaggtaggaggatcacttgagtctagaagttatggctatagtgtgctctgccaattgagtgtccacactaagtttggcatcaatatggtgaccttctgggggtggaggaccaccaggttgtctaaagaagagtgaaatcagcaggggcagaaacagagcaggtgaaaactcccattctgatcagtagtgggatgacgcctgtgaatagccattgcacttcaccctgggcaacacaatgaggccctgtctctttaaaaaaagaaagcgctttgaatgctggtaagttctcccctcgtccccatccactaaacaactaactatttccttagcctgggcaacatagtgagacccccatctctaaaaaaaatagtaaaatataaaaaattagctggtgtggtggcacacgcctgtggtcccaactactcaggaggctgaggtaggcagactgcttggtcccaggaggctgaagctgcagaactactcaggaggctgaggtaggcagattgcttggtcccaggaggctgaggctgcagtgagtggtgattgctctactacgctccagcctggacaacagagcaggatcctgtctcaaaaaacaaacagaaaaaaacccccaaaaccaaccaaacaaaaacactgtgtccttcacctgctctagctttggagaatcctctatgacaaatggcatttaaatggcattatagtcagttgtgtcacaaaatcgactaaaccaaaaatttctgtaactgccactcggttgtcttcttattttcactcctcatattaattccactgctgcacttgtttttgtttctaccaattacaaaacctctattaaaataacataaaagtaccttttttttttttccctgtgatggagtcgcaccctgttgcccaggctgcagtgccgtagcgtgatctcagctcactgcaaactctgcctccagggttcaagcgattctcctgcctcagcctcccaagtagctgggactacaggcacgcaccatcacgcctggctaatttttgtatttttcgtagagatggggtttcaccatgttggccagcctggtcttgaactcctgacatcaggtgatctgccggcctcagcctccaaaagtgctgggattacagatgtgagccatcgtgcccagctaaaaggaacttttgaaagaaccccccagacaactctgttgcagcatctgaatatatttgttctgattttctttagtcccttccaggctctgttcttcagacattagtattttttacagtttcttaatcagagggcatgtacaattttatattctgctgtttctacttaatatgatattattgacattcttctacattgttacataattaaacttttcaattgcagcataacattttacaggatatatatgctataattcacatagctattcaagtaatattgaataagttatgtatccctttttcacacccatccctccttacagattccactgtaataaacatctttaaatacatagcttgacaaaaaagatttattaggatcaatttccaggagtgagcgagattgttattttattgttattattattattattgttttttagagacaaggtctcactctgtctcccaggttagagcacactggcataatcacagctcactgcagcctcagcctcctggactcaaacaatccttccacttcagcctcctgagtagctgagactacaggcatgtgtcatcatgctcggctaattttttttttgtagagacaaggtcttgttatgttgcccaggctggtcttgaactcctgggctcaagtgatcctcctgcctcggcctcccaaagtgctgagattacaggcgtgagccaccgtgccaggcttgagtgagattattatgtgaaaggggataaacatttaaatcattctcgacaccacagctaaactgctttcctaagggctattaccagtttatgtggcaaatttgtacaatacattgtcaggatgccccataacaacagaggaaatggtctattaaatgccagtgtactctgataggattttctgagggccacacccaatgtgtaactcaggagtgttacattcacatccacttatgatttccaaaatttaggcacagtttatgcaagcccgtggcgatgtgttttctgctgctaggcagctttcaaaatactgtatggttaatttttccttgcagattgacttttctggagatatatccatatctccattgtaattggcccaattctaaaacgctgaaaaaggaggcgttggaaggaagggagggaatggatgttgagagtccacagaaatgcaaagccaggggatttcccaagcttcagcaagaaaccagggaggctcggtatttgacagaatgttcatctttgggctgtgattgttccatctctctctctctctctctctctctctttttttttttttcttttgagacatgatcttgctttcttgccaggctggagtgtagtggcaagatctcacttactgcctcctctctcttccgggttcaagcgaatctcgtgcctcagcctcccgagtagctgtgattacaggcgtgcactaccacacccagctaatttttgtacatttgtagagatgggttttcgccatgttggccaagctggtctcaaacaaactcttggcctcaagtgatctgcccgtctcagcctcccaaagtgctgggatctgcctggccctgttccatctcttaagtactttctttaaaatcacattttggctcaaaaagcaaatgggtatttgactgatgaagaacaatatggattttaaaaatctctctggtaggggacaagagcaacctagtggcacccctcattgctcctccctgtcagaatatttctcacctgttttccacccctcgcttcctgactaggtctcccggaagagcagctggtgcattttgctgtctgttttgtgataaacattcagctctttttccctcttgctatttcatggatatatgtgagggtgaaatcaataatactatacgtgaagacttttaaaaactaagaaaagcacgaggtttcaagggtgcaaatacttattagtattatcatcactaatatttgcaaaacaagaaaaagaaataatattgctaaaaataagaaattggaaaaaattgctgacagaagtcaatttaagaataaagttgaacatgattttggaaggctggtcataaatacaaataaataaatatacatatatatgttggtatcaaatatattgaattttaggtctagataaataggcatttttttgtttcctaagaaaatattcaaaattttagttgaaaatggtgaatattttctttgtaaactttatcttaaggcaaatatatagataagactgtatgaaatttcagctgatatacattactaattatacactgttggctgggcatggtggctcatgcctgtaatctcagcactttgggaggccaaggcagatggatcacttgaggtcaggagtttgagaccagcttggccaacgtgacaaaaccccgtctctactgaaaacacaaaaattagccggctgtggtggtgcaagtctgtaatcccagctacttgggaggccaaggcaggagaactgcatgaacccaaggaggtgtaggttgcagtgggctgagattgtgccattgcactccagcctgggcaagagcgcaagactccatctaaaaaataaataactaaacaaataatacactgttaagactgacatcaaggctatctctgggaatgcattaataggtaaaactctgatatttacccaataaagtcattgaatgcttacactgttcatcttgctatggtagacactttaaaggattgagtaagaaaaaaaaactatcctttccatttataagcgtatttttttctcataaggaaagatatgatgtttgggtaatatggggtttaaattgcttgttgttttattgagggttgagggaggtcttataatgtctggaaacgaattgaatcagctaatgaatcaacggtcattattgttttaaatccccatttgccaattctgagatattaaaatagggaatgcagggaacattacaaactgccatttggttatttaatgtgatttctggggcaccaggaaagcttctttgagcaacaaactctctctcttccttgtttactattccttaaaagtgaataatatccctattctctaatttaagtgcatgaggcctttgctttcagactctgcctctttcaaaatggtagagttaacaagttgagctgatagttgttgacaaccacttacgcttgggatgagttggtttcaaattttgtcttgaaaaggattttgtttgggaaacagcttaagatccaaaatatgggatggagactacaataaagagtagagaggggactccagagaaaactctgtctcccatcacaatttgggttaggatcagcattgtagaaaacactaccaacaaatctggaaaagcaggtaaatctgtagtctttctgcaacaacatggaacaacatgacattctatgagatgactatataaatagggaagaaagtgaattaatctccaggagaaatatctagacactctatttttattttttgatacagagtttcgctcttattgcccatgctggagtgcaatggcatgatctcagctcactgcaaccttcgcctcccaggttcaagtgcctctcctccctcagcctcttgagtagctgggattataggcatgcactaccatgcccagctaattttttgtatttagtagagacggggtttcaccatgttaggctggtctcgaactcctgacctcaggtgatccacccacctcagcctcccacagtgctgggattacagttgtgcaccactgctcctggtcctctctctctctctctctctctctctctctctctatatatatatatatatatatatatatatatatatatgtatttttttttttttttagagacagggtctctgtatcttgtcacccaggttggagtacagtggtgcaatcatagctcactgcagccttgaagtgtgggttcaagtaatgctcctgcttcagcctcccgagtagctgggactgcagatgctcactaccacatcctgctaatttatgtttattttttgtagagaaggagtggcactactgttgcgcaggctggtcttgaactcctggcctcaagtgatcctctttgcctccgcctccccatagaccactctagagaacattgtactcagatggaacttgaaccatccagaataaatcaggcctgggaaagagagaagagaggcagcagagagaactgtctgagaagagtatgttggcagcccagctgccaaaaagcagtccagatggtcccaacttaactgaaaatggaaattttccctgaccctttcatgggccttgtgacaaggatgcctcatttactcagcctgcagctttcaacccctcgtgggaagaggagcacacaggtgagtgggtgcaggagctggagttaatgctttcaggcgctggcaggtgcaaaactccatgcaggccccacggcagcatcttgcagggggtggtacccatgacccttgaagccccagagggcatgtattacaggcagcgctttgagcttggctgtccacagacggcttaagtgtttaacagctcagtggaccctctgccttttcacgagggcagagggtcactgtgacagctttctgtaccccaagctgttgtctggtgtccaggaaaaatcaggtcatacgaatgaattgaaggatagtaaacatgggggattttattgccagtggaagtggttcttagcaggaaggggagctggaaagaggatggagtgggaaggtaatcttcccctgaagtctggccatttgtgtttgtggctagactctttgaaattccaccgtcaagccatccctctgaagtcaaactgcttctctccaacattcatcagcttcttctcttctctccttccctgcttctctgccctctgccagtggagcctggggtttttatgggtacaggatggggggcgggccaggggtggttttggaagaggcaacattggagcaggaaattggggatgtaaagttctcactttgggccatggttccaggtttgaaggtggggctctcaccagggaccccacccttttctgcctagaatttctctgcctcctgtctctatcattaccatggcttgagttaggattttttgactttacaatgggtttgttgggatagtaaatgcattttcaacttacgatatttttgactaaggctgagtttatctggatatagccctatggctaagtcagggagcatctgcgttaaatgggtgaggctgattgttgggaacccacaccctgtatcaggtgagcatgcattttactagacttggccacttcttacatgtggaagatgtgagaaagtctacatcacccagtgactttcattctccaattttgttttttttgagatggggtctcactttttcacccaggttgcagtgccgtggtgcaatctcggctcacttcaacctttgcgtccgaggcccaagcaatccttccatctcagcctcctgagtagttgggactacaggtacccaccatcatggccagctaatttgttatatttttggtacagactgggtttctccatgttgcccaggctggtctcgaactcctgagctaggagatttacctgcctcagcctcccaaaatggcgggattacaggtgtgagccaccatgccagccccaaacttacttttctgtaaaatagtttgggactgaacacagagattcttaatcaccttgtttctttcagatgtggggactcagtggaatgtacccatccaggcaagcagtggttttgcctgtacctggtgcctgatccctagtcgggagcagtgtccctgctttccctaagggaggacccgttccaaaacctttcatttgcacagccgtcagttacaaccttctatgaaattgttctcaggacttaagtcttgtaaaacagcccaaactcccttaaattctttcttgaaagggcctgtattatgtgaggaagtgctaaccccacccttgggcctggttcctgctgggcagtttagaaagaaagctgaacagtgagctttcccgggccattattcagctctgaaaggtaatcaaagggaatacctttccttctattatcctattgctgagttttacggagttttatggaggactgcctctgaatacagacgtgttcaaagaagccaagaacctaatataaacaagaatttccaaacagtgcttgttcagatgatcttattcagatggcttagcactgccaggttcctaaaggtcaaggagccgtcaccactggggcctccagaggactgaattcacctccacaactgaatctcctgcctgccagatgcccaaataggccatgggggcaggtcacttgctttacatttcatataaatgggatcatacggtgtgtactcttttgcatgtggcttttttgctcaagctcattttatgagaattcatcatattgttgcatgaagctatagttgttcatttcaattgctgtatggttttccattatagaaatagaccactatttatttattccttctactcacatgatatttgggctatttccagtttggagcatctattggtttcctagtgttgttgtaacaaaggagcatacatttagtggcttaaaataacacacatttgttatcttatagttctagaggtcagaagtccaaaatgggtctgcaggactattttacttttggaggctttagaagggaatccaattccttgccttttgaagcttctagaggccacatatattccttggttcatggtccctttttccatcttcaaagccaagaacatagtattgatagatgcaggaggaaaataagggggaaggtacccagagaacctcccactggcctgcgcactgggaggatgaggtgcagccttgggaagtttgtgccatttgcagcggggaggagcctagcctctcctgttcctgtgtggtaacctgggattcattctgtgagatgggggtctgttaacaggaacccttctcactttgctgagtttttttccttttcacccaataaattccactccttacccttttatatgtccgcgagcctaatctctcctggtcctgtgaccaggacttggctttttctacaacaacatttttttctcctctctcaactctgcttccatccttatttcttctaacattgaccatcttgtgtccctcttaacagcatccttgtgattacattgggcccacctgaattatccagaataatcttcccaccttaactttatcacatctgcgaagtcccttttgccatgtaaggtaacatgtttacaatttccaaggattaggctgtggttatctttgggaggccattcttcagcccgctacagagccttatgaataaacttgctcttgacattcatctatatgtcctaggatgtacacattctgcatttcctttggatgtacacctaagaatggaactgctgagttagggtatgcatatgttccgctggtagatccttgcaaaaacagttttccaaagtggtgcgaagttacattcctaccaacagcatatgagttccagttgatctgcatcatctccaacacttaaccactgcgattatatagaagtgtctcattgtggtttaaacttgcacatctttgatgactactgaagttgaatagcttttcatatatttattgaccatttggatgccctctattgtgaagtatctggtttttttttttttttttttttttttttgtcttttgcctattttcctaatgggtggtcttttccttattgatttgtaggagttctttatgtattctgggtctaagccctttgtcatgtatttgtgctataaataccttctcctactttgtggtctgtcattttactcctttaatggtatcctttgatgcaaaaatgtttctaattttaatgcagtccagtgtctacaaggaaatctcaagaaaaaatttttaaaatatttttaactgaatgaaaatgaaaacacaatttatcgaaatttatggagtgaagccaaagcagtgcttggagggaaatttatgccgtgaaatacttacattagaaaagaaaggtctcaagttgctaatgtaggcttccatcttagaaactagaaaagaagagtaaataaatcctaaagcacgcaaaatgataaaacaattataaagaacaaaaatcaatgaaattggaaacagaatataattgagaaaatcaataagaccaaaagttggttctttgaaaagatcaataaaactgaacaccttgatatcaagattttcctggcttcataaaacatgttgagaagtattccctctttatttattctttaaaagagtttctttaaatgttggtagaatttaaatagccaggggtggtggcaggcacctgtaatcccagatactccagaggctgaggtaggagaatcgcttgaatctgggaggcaggggttgcagtgagccaggatcgcaccactgcactccagcctgagtaacagagtgagactctgtctcaaaaaaaaaaaaaaaaaagttggtagaatttaccagtgaagccatctcgttttgtgtttttttgtcataccattttaaattcattgctttaattgctttattataattttttagttcttttgttagtttttgcatgtcttggtttttaatttgttcattacaattttcaaattatgggcataaagtttcccatgatatctttttttttttaaatgtaggtttgattgtgatgtccttcttttgaatttcgtgtattgtttgtgtcttctctatgttaattggtcttgtcttttattgatcttcaaggtgccaacttttggtattgttggttgattgtagatttattttcttttttactaatttctgcttttttttttctttttagaattagattggatttttttattattttctaaattatttcgatagattcttttttaaatttttaattttttatttcaataggtttttggggaacaggtggtctttggttacatgaataagttctttagtggtgatttctgagattttggtgcactcatcattcaagcagtgaacgctgtgccccatgtgtagtctttcatccctcaccaccccccaccctttcccctgaggccccaaaatccaatgtattactcttatgtctttgcgtcctcacagcttagttcccacatatgagtgagaacatatgatgtttggttttccattcctgagttatttcacttagaataatagtctccaattccaaccaggttgctgaaaacgccattattttgttcctttttatggctgagtagtattccatggtgtgtgtgtgtgtgtgtgtgtatatatatatatatatatatatatatatatatatatatatatatatatatataccacatattctttatccacttgttgattgatgggcatttgggctggttctatatttttgcaattgcaaactctgttgctataaacatgtatgtgctataaacatagattcttagaccattggttttcactttttttcttttcgaatatgtgcattttaaagctataagttttcttctaagcttggctttaaataaatcccacaaattgtgaaatgcagaaatttaattgtggcttaattcaaaatattttctaatttccattgtaatttctcctttgacttatgggtattataagcatattgattaatttcccaacatatggagatttttctccttaactttttgttacctatttttagttttaactgcagttggagaaaatactctaatcttggtattgcaaattctcagtaccttggtagctctccaatgtcctaaaaaatgtttttatatttatctcagctttctagttgttttcagaaacaagtttgatacagagtaacctatcagttattgccagaaacataactaccaccagtgataatttaattaattgtgacaccatcacaatctgtagatcaccagtaccccattttccattagttaaaaaacaaacaaacaaacaaacaaacaaaaaacaacaaaaaaaaaccagtcatcattgcatccatggccagagagttaagcaactcaacctcagcattctatctcattttctccaaagcccatgttctattactaacatgctgtttattacatttattactgcttccaaggtcccctctgacagattccacattttctgtctaaacttatttatagggccgggtgtggtagctcatgcctgtaatctcagcactttgggagtctgaggtgggtggatcacctaaagtcaggagtccgagatcagcctggccaacatggtgaaaccctgtctttactaaaaatacaaaaattagtcaggcttggtggtgtgcacctgtagtcccaactacttgggaggctgaggcaggagaatcgcttgaacccaggaggcggaggttgaagtgagctgagatcgtgccactgcactccagcctgggtgacagagtgagactctgtctctaaataaacaaacaaacaaacaaacaaactgatttaccttctgtcttaacttggtcctctcaccatactttttcaatagtcttctccctcttgtttacaaacagcaaatgcatgtcatatttctctgctcatgttattctcagcctcttctcacttctctttggaatatctactctttggttattttcgtttaacgtataagaaaagaagggaaaaaaagatgaaatgtatgtcactaaaattgcctcaaacaccagtagtggcacgagtcacagttttagaaactctgagctggtgtgagaagcagggcttctgccccctggtggggaaaggaggatgccccaggacccacggtgacttatgggggatgttgtccacgaactgacatgtctgttggggaatccatcacaggacctgcataacaatttacattttgagttttccattccccaaatggcacatgattctagaaacacttgttttacttaggtaggattttatagatacatacatgtgctacaaataaatattgcttccaaagctgctctgaaaccttagccagcttctaagatgggcactgctcttgactggagatagaaataactgtaacgttcatatgaacaggattcacagtattactcatatttgagtggttcctggaaagagggcagtaatgaccggattccccagggcaaaacagaaacaaaaagccctcttttgatgagaatgggtttggtcaaatgtttttggtgccatgggtttgttatttctttctgaaacttatttgaagagtaacgccaactgtcccaggcagactaaaagtgaccctaattgtcaagttctcaagaaaaggcagttccactgagtccctgtgtctccctttccaagactcaacccctctgccacagcctaaggctacttcctctcctttccttagtggagatgaacactagctggtcactaactgccaaatatctaccccttgctactggattccacgacagtgaacctgctcttcagctttctccctacaataatctcctttgctttaacctttcctcatgggccctaagtttgtctcatccctaatcacagctaaaaaagatggaactgaatacagcatggagtttaacagtgggacaaagaaaggaaccatttcaccctagatttgtgtgttctgctgaaacacagggctggtttcatgtcttcctaagtatttcattacaatgaagaaaacacagttcttgttggatgagatgcctgttgaggtgttgcaaacatgatgatgtcatgtccaggggaggaaaatgaatatcccagggtttgaaaccaactccctaggcagatgaagccagcagagcaagaaccttgccagcacaaccagtggtaaacacacgaaggtaaatatggatatggcctttgcttcaatgggattccaagtcctgggaatgccaagaagcatatatgtctttggggccgccaaatacctacagcgttgtcttatacatcacaagcagtaaatacacttacccacagacacggagagggagtttccttagcctctttcctttatgtgaatttgaagctgcctgatcagagtacagatgtggcaatttactcaagttctgcccttggttttccacttctgttagggtctttgagggattccaacagacaacattcccttcactgcctgatttatgaaccaattaagaaacaaagtggccaggtgcggtggctcatgcctgtaatcccagcactttgggaggctgaggcaggtggatcacaaggtcaggagttcgagacccagcctggccaagatggtgaaccccgtctctactaaagatacaaaaaattagcctggcgtggtggtgtgcacctgtaatcccagctactggggaggctgaggcaggaaaatcgcttgaacccaggaggcagaggtggcagtgagctgagattctgccattgcactccagcctgggtgacagggtgagactctgtctcaaaaaaaagagaaaaaaagcaagtgtgggcacaatggctcatgcctgtaatcccagcactttgggaggctgaggtgggagggttgcttgaagccaggagtttgagaccagcctgggtaatatagcgagacgcccatctcaacaaaaaataaaaagttagccaagcgtggtggtgcatgcctgtagtcccagctactcaagaggctgaggcaggaggattgcttgagcttgggaggttaaggcctcagtgagctgtgatcgtgccactgcattcaggctgggtgatagagtgagaccctgtctcaaaaaagaaaagaaagaggctgggggtggtggctcatgcctgtaattccagcactttgggaggccgaggtgggtggatcatgaggttaagagttcaagaccagcctggccaagatggtgaaacgccatctctaataaaaatacgaaaattagccagatgtggtggcgggcacctgtaatcccagctactagggaggctgaggcagagaattgcttgaacctgggaggcagaggttgcagtgagctgagatcgtgtcactgcactccagcctgggggacagagcgatactccgtctcaaaaaaaaaaaaaaaaaaaagaaaagaaagaaagaaacaaagtgagagagatgacaagtggaggctataataccactttcttatgctgacattgaaaagatagcttatatctgtgagcaaataaacctcccaatactgaacccccctcacagcagcctggactatggcagcctcccaccctggacctgccccgctccagcccacccctgactcctgccctctgatggcagggtagctgtcaaggaggaaaccagagagaggctgagccaaccacaccagtttattctctctaaagttcctatcagctaaatcactccatcttctctgagcagaggtagagagagagccagatgtcacataaacagagccacttcctcctgaaacaactattcattgtgggaaataagttacttccaaatcctacctaccctgatgccttacctcccttagggactgtggtcttgagtccctcaccattgcacacccaagcatcttggcagagataacctttcatagagatgataaagtgtgtgtgcatgagcaggcatatatgtgtgcatgtatgtgaggatgaacaaatctacatatatgtatacatatatatctgagtttgcatgtgtatgtgtgtgtgaatgtgtgtataggtttgcctatggtgcaagtgtggtgtgcgttatgagtttgcatatgagcttgtgagtgtgtaagtgtacatgagtgtgtgcaagggcacaggtgtaggcatgcgggtgtgggtgttcatgtgtgcctaaatgttcatgtacatagctgtgcctatagtataagtaggtgtgtgtgtaaatatcaagctttggaaccaggctttcaggtttcatatttgggcagattcattccaagaaacattccttgagtatctatgatgaccaatgactgtggcaaccataaggaggagtattacgtttctctggatgcaaaaggcttataagcaagtagaagagacagacacataagcaaccctatgcaacacaagacaaaagatgttaaatgccattgttataacacaagaagaagaattgttctgacttgctgaatgtttgaggtcagcttgagaggagataggaggtgacaggagggccgttcaggcacaggaataacatgagctcaggacccaggtagaaatatagggcatgtttaagcaatgagtcattcgttgtgccaggcacataaattaacatgagagttacaacatcagatcagatcaaggataacatctggccattcctcactatatttcacagggcacacgctgatgaaggagggggatggccaattagtggggaactcggactcttgtactaagaagtgtgaacttcctttcttaaggtaaagggaagccattgtgttagagtggagccggggaaggcaagggtgggataagaatttcagggttaagaagctactgcattggtctacatgagtgataatgagggggtcaaaggggtgacatagtttacagatacactcagtggatttttattaggctgaagggaggttttccaaatctggtgactggtcatttaatggtgtcactaacagggctaaggaggaagtggatgatgggctaaagaagttgaactgcaatttgaactactgtgtctcccctgataatcactcagtgctatgcttcgtgcacccaacccccacacagatgtggacttttgggaaatgcgtcctcttgctgactaggcatcaaagaatgagtatttcctttgtcaccattgcctcatcttccagagaaaactcttcacttctggaggaagccaatttctctttcatctggaaccttttatctctaataacattatctctatagttttaactcaagaaaggtctcggtttgagtcttcagttggagccctgaggaagcaggttccaagaacaaaggagagattgctctttctctggtcttctctgctcaaacaatagcaagctaccttctggacactacagtgggcatgtccagtggtgcatcacctgacagagagatgcagggactcaaaacaggtacatttattgtgtcaaggtacatttgtgagtacaaggaagagtcacgtccaggagaggacaggctgaagaggagcttcaaccaatagatggggctctgctggggccactaggatgtcagcagggaagcctcggagcgccacagcagcgtagaaggcctcgggctgcagaattcagcaggactaggggctaaatgtgtgatgaagttggaaaggcgaacacaacagcaattgaagtggattccaagaataaaaaatgattcgccagaaatacgccaggacacaggcagctaaagccaacaaaggggtggattcccaagatggggacctgagaatccaaagggatcgaaaaatcaaacatagccaggcacggtggctcatgcctataattcccacactttgggaggccaaggagaatagatcacttgtgctcaggagttcgaggccagcctgggcagcatggcaagaccacatctctacaaaacacaacaattagccaggcgtggtgatgtatacctgtagtcacaggtactcgggaggctacggtgggaggatcacttgagcctgggaggttgaggctgcagtgagccatgattacgctactgcactggagcctgggtgacagagtgagactttgccacaaaaataataataataaaacagaaaaaccaaacatcaaataatgcaaagacacatgggcttggggcaattcgtggctttacggggtgaggtgcaatgtcagaaagaggcgcaggcactggggttctttagtctggagaagaggtggtagctgttacctaaatcataagctcctggaaggcagagaatacagatctgatgtcttgattagtaggtaataaatggatattggttgaatgattgcttacttaagtaagcccttcaaggggagattctcttaattgctgcctcatacctcagaatggctttgattttctcatttctcttttttgccctggcagctgttattgcctcagcaagctaaagctgttgctatttcagcatcattgctaagaagggcattgaagcatctttatgtcaggctgagctcactcatccagattaattccctagatgtccagcataatttctggtaaagtcaccttttggtctgaacaaaaagcagataactcactttatctgtgagttttttatcttgttgacaaaccaaaattcttatccatttcaatttctgtggcaatttaagaaattgctagcagaagaaatgtggactttggaaggacacattaagcctgcactttgctcctcgctatcatgtgaatgcctcagtgtcctggccatttctgattcggttctgggaggattacagaaacatcatgattactgtgctctctaagcctctcactggttttaaggagggggctgatttccacttttatttatagaaacttcgagaatgatctccaaagctcaagagttcaagaagctatggagaatcttagtgattgagaggacatttgggttcatctaaaccaggggtccccaacccgcaggccatagtccagtactggtctgcggcttgtaagaaatggggccacacaggagtgagtggtaggtgagtgagcacgaccacctgagctccgcctcctgtcagatcagcagtggcattagattctcataggagcgtgaaccctattgtgaactgtgcatacgaaggatctagattgcatgctccttatgaggacctaatgcctgatgatctgaggtggatcagtttcatctggaatccatcaaccccaaccaacacgtccgtggaaaaattatcttccacaaaaccagtccctggtgccaaaagggttggggactgctgatctgaaccccttctgtgtcagagtgtggcttgcctaaggttctttgactaagtggcatgttggtgctttgaactgagcaactgagaatctactatgtcatgccttctcatcgacggaagtacttgcagtggatccagatatttaaaatgaatgcaaaaaagggggattaaaaatgcagtaaaaatgcagtgaaaacaaaaaaatgtaaaaataaggaaaagtcctttttttatttttcttttttgagacagggtcttgctctgtcacccaggctgaagtggactggcacaatcacagctcactgtagcctcaacctcctaggctcaagcaatcctgccacctcagcctcctgaggagctgggactacaggctcacaccaacatgtccagctaattttttattttttcaagaccagcctgggcaacatagcaagaccccatgttgcccaagctgatcttgaactcctgagttcaagcaatctgtctgcctcggcttcccaaagtgctgggcttacaggtgtgagccaccacgccaggcgtgaaaaaaagtcttaaacaacaacaagaaaataatgcatatagtatttgctctctagaccaggtaatcattctgctaaacatgctgctgtgtccaaaagacaaagccttctcaaactgtcgaaacgtgtttctcaaaaggttcattatattctttcttctctgcaaaaatgacaagcagttaccatctttttctgagcaaatattgacaacccctagcacccaacactatgaaaattcaggtatattaagtttaacccatcatctgtctcagtttttgtcccctaaaacaaaggaaaattataggcacagtgctaacaatggaaatgtgagttttttcctcctttggtctttttgttgctagggtgtaagcccatgtgtgttgtaaaactctctcccatctggctggttcttgaaacttctctgggtcgcagttcttacagttgagcaattaattctaacacttgggaacggctgaaatgaaggagatttcagagagaatagctcatgaccttatgcctttgtgtgttttactgagaactgacctcctgcgttactgggaaagaaaaatctattaaaatctcttgggtgaatacttcagcaggctgatttcattttgaagtgaatcatttggtgcattttagaaggcatgataaatgatgtcatctcaaatattaatataaaccctggataacatgctttttactcagattcagagttttattacgatattgtaagaattccattaggccacacctacaccgtttgaagtctggtgagatgcaagggtggaggaacaacactacttgatactgtcaaatccccagaactagaaagtatctatgaattaacctgacaacaataaaaccacacaaagttacgggagaaaaattctaataaagggtataaaagaacaactaagtaaacagatatatacatatcatgtctaatggatgggcaaacttagcaccaagtagatgttaatgctccctaaattaatgtctaagtcaatgccattttaatcaaaatctcatgataatccgtaaattggaaaaattaattctaaaatgtataaagaaaagtccacaaatagtcaagggaattctgagaaacaaaagcaaaggactagctctattagacagtaacccgcattacaaagcataaacatatggcaaggttatgccctgatgggcagaacaggaagtttagaaacagaatcatgtggccagacgcggtggctcatgcctgtaatcccagcactttgggaggccgaggcaggtagatcacttgaggtcaggagtttgagaccagcttggtcaacatggcaaaaccccatgtctaccaaaaacacaaaaattagctgggcatggtggcgggtgcctgtaatcccagctactcgggaggctgaggcaggagaatggcttgaacctgggaggtggaggttgcagtgagccaagatcgtgccactgcactcctgggtgacagagtgaaactgtgtttcaaaaaaaaaaaaaaaaaaaaccaccaccccatcaccaaaaagaagaaacagaatcactctgcagaaaaacaaatagatttaaataaaattcaaaatttaaatttattttatttatttagagacagagtcttgctctgtcacccaagctggagtgcagtggcatgacctcggctcactgcaacctccatctcccaggtttaagcgattctctttcctcagcctcctaagtagctgagattacaggtgcctgccaccacatccggctaatttttatatttttagttgagccaggtttcaccatgttggccaggctgctctcaaactcctgacctcaggtgatccacccgccttggcctcccaaagtgctgggattacaggcatgacccactgtgcctggctgaaatttattttaacaatatatgataatgtataattatattgatacataacacatatattaatatttactgtttataaagatttaaatgatttcaatgaattaaaaatcacaatataaagaaaaaagaaatgccaaatagttttaagactataaaactactaataagaaatctagaactatcttttttttttttttttttttttaaaggcagagtcttgctgtgttgcccagggtggaatgcagtggtgtgatcatagctcactgcagccttgacctcctgggctccagtaatccttctgccacagcctccccagtagctgggactacaggcatgagccatcatgcccagttaattgctttttttagagacagggcctcattacgatgcccagagtggtcttgaactcctgatgtcaagcgattctcccacctcagcctcccaaagtgttgggattacgggcatgagccactgcacccggctagaagaaacatctttataagcttagagtggcacagtagattgagaaaagtaacaactgcactggcagcttctcccagcaggaggtgggggcttttatttgactccttgagtttgggtgtggccatgtggcttgttttggtccactgggcattaacaaatgtgaagaaggagaggcctggaaagctcaggtccaccaggcttgccctctcctgcgctggaatcccggagccgccgtgtgcggaaccctgggctgccctgttggagggtgaaaggccgtgtggagtaagaggcccagccatcccagctggggccatgatgtgagtgaggccccccagatcatccagcccccgcccatcaggccccgttcagaagcaattaatcccacagcaatgaatccttgttggcttaagccactatgctttggtgtggtttgttacatagcaaaagctaactgattcaagcagggcacaaaaagtgtaaatctcaaaggaaaaattaatggatttaacaacatcaaaagtaaacaccctagatgaaaggtaacagacaggagatgggctggaagaaaatattttgcagaaccaggactgaagattaaaatgtaaaaaatctaagggacacttgcaattgcaagaaaaaagttttaagtaggcaaaacctgaatgagaagtgcaccagaagtaaaaccagagtagttaataaatatgtgaagagactctcaaactcattagtaatcaaaaaaatagagtatgttaaaaatgagatactacaactattagaatggcaagaaataaaaagttgtatgatatcaagtgctgacaaggacatggggaaatgaaactcctcattacactacagatgggcaggagtcaccttctgttgtcatttgtgaaggtcagttgggaagcattttgtgaaaacatgcacatatgtatactctcatgtgatccagcagtacagttcctgggtgatatcccagagaatccttctgacagatgcacaaagagatttatgtcagtttgcagtagcatcgtctgccagtgtaagccatcccttagtgggagggtgtgtaaggaaaatgtggtatatgcataggatgggaaaaccataaggcagccagatcagtaaataagatttacttctatcaacatggctagatctcaaaaacacgttgaatgggccgggcgcggtggctcacacctgtaatcccagcactttgggaggccaaggctggcggatcacgaggtcaggagatcgagaccatcctggccaacatagtgaaaccccatctctactaaaaatacaaaaattagccgggcatggtggtgcatgcctgtaatgccagctactcaggaggtggaggcaggagaatcccttaaaccagggagttggaggttgcagtgagccgagatcgtgccacagcactctagcctggcgacagagtgagattccgtctcaaaaaaaaaaaaaaaaaaaacacatgttggatgaagaaaatcagtagaatgagatgtatagcacaatgcgcactggtaaattaaagtctatattatatagatgatgttatgtatatgaaggtatggaaggtgagttggaagaacacacattaaaacataggtactggctggatgcagtggttcacacctgtaatcccagcactttcggaggctgaggcaggaggattgcttgaaggcaggaggattacttgggccaggagttcaagaccagcctggatgatatggtgagactccatctctaaaaaaaaattaaaaaattagctggatgtggtggtatgtgcctgtggtcccagctactcaggaggggaaggaggaggatcacttgagcccaggaggttgaggttgcagtgagctgtgatcacgccactgcactccagcctgggtgacagagcaagaccctgtctcaaaaaaaaaaaaaaaaaagaagtgaaataaaacctgggtactcatgggaagagagtaagattggggatgggtcattaaaagactgtaatgaaaccaaatcagaacatttgtctcatcagtgtacttactgcttatgatgactgcatgaggtttatggatagagctgtgatttggaaaaccaagtagaaaaaatataaacaaaaaggaagagcctcctctatttaaaaaggatacaaaatacagtgacatcccccagttttggcaacattctgctggtgtcactaatatcactattaacctgtaactctaaatggacacccagcggaaaccaaaacaagacaaaaggcattgttctccttcttaaaggaagaatccatgtggggaaaaaccccaggcttattgtttaaatcatgtaataaaaggcatcatattaaaccctttactggtttctacattgcatcctgctctatggccttgctgctttttaacaaccgcttgcttaaagataaaatcagtatctatacagggcctcatacattatacctcttttgagcataatttatttcatctactttatatccaaaggtgaaactaaaactattttatattcttacctgaaaaaccactcacgcaagaatcaagatgttgttctctgagttaaggatttttcctggccccagtcctgttactttggttaccactggctaagcttttcgttgccatttgagtttgtgaacacacagagtaacccggatgagactatgggtgcaagtgtggtgggctggggtgggaactgtgtcagcaccggggtagacagaagtcaaggaacttctgtggggagctgatcagatcagccagagtttacactgtcagcatctgacctcagagttggtgggccacgatcagtgatgagtcacaacttaagaatagcgcagtggaggctgggcatggtggctcacgcctgtaatcccagcactttgggaggccgaagcggacagatcacctgaggtcgggagttcgagaccagcctgaccaacatggtgaaaccctgtctctactgaaaaaacaaaaattagccaggcttggtggcacatgcctgtaatcccagctacgtgggaggctgaggcagcagaattgcttgaacccaggaggcagaggttgcagtgagccgagatcacattactgcactccagcctgggcaacaagagcgaaactcagtctcaaaaaaaaaaaaaaaaaaaaaaggatagcacagtggaaagagatgctcaggtttagtgtagcaggggctcaatttccaacaaaggaaactgtttatatgaaagggaaaaatccctaaaacaataagaacccatcgccaacctcaaagcctatcgattggaaacaactgttcaccagacggctcagcttgatttcccagaatgtgagacaattccatgaaggaaaacaagctgatttcaaaaattagaaataactcaattaactaggatttccttttagtttggtttgctttgctttttactttaattactccataaggtccaattgctgtaatgtgagaatcctaaatgagtaaagttggatgccaagttaaatgctaagaagacctggggagaagctgggcgcagtggctcacgcctgtaatcacagcactttgagaggccgagccaggtgaatcatttgatgtcaggagtttgaggccagcctggccaacatggcgaaaccccatctctactaaaaatacaaaaattagccaggtgtggtggcatgtgcctgtaatcccagctacctgggaggctaaggcaggagaatcgcttgaagctgggaggcggaggttgcagtgagccgagatcgcatcattgcactccagcctgggcgacagaacaagactctgtcaagaaaaaaaaaagaaaaaaaaaacctcaggaaatctcagaatgatgagtgggaagaaaagtggggtgggctagtctgttggagtagtaggattacagggaatttttctctttgttttaaacttttaatattgctgttatcaagttgagcaataaataatcttttctaaatgtaagcattccttagggaaaaacaaacaaacatgctaacctttcctctccatcacgctgtggggaagcttcattggttccttaaggagactataatcaaaccacttttttcttgctcatcataaggtttaactaggggcaaaagaggacaagaaaaataattagagccataattggtgggtagatggaaacagagtcctagggttggaaggaatcttggaaatatgttttgcccatcccctcagctctcgggccacacctaaactcttaaagccctcaggaatttactgtgctgaggaccgccaaggacaatgcctaatctgtcttagaaactcattctagtgtctaagaatacttactggcaggaaattcaactttgtgagtaaattcagactccactcccatccatttcctctggctctgatttcgggtggagatggaccgcagctggacacacattcaagtacactcagcaaacacacgtgaaggttgttaccaaaatagccccctcccatccccacctcagctttctctgctctgggttaaatgatcccagcccctgtatgggataaatgatcccagaaatctctcctgatcggtttcattatctgaacttagacctacctgtgcctaatctttgaccaacagtccagtagggggttcaccaccactggctctagggtgatcaactgtcgcagcttgccagaggttgcccaggtgggacttttagtgctaaaaccaggaaagtcccaggtaaactgtgataagttggcctagctggctgtctctggggaaaaaaatgcaaccaccggaggaatgatcttcattgctaaaatgcaatgttacacgacgtgtcatgaatatggagacagaaccatctgaaaagctgctgtggtttgaacgtccctccaaaactcatgttgagatataagtgccattgtaacagcattaagggtggagcctctagagaggtgattagatcatgagagctctgccctcatgagtagattaatgccgttattgagggaatggttagttatcacctgagttggttcctgattaaaaggatgagtttggctgggtaccatggctcacgcctgtagtcccagcacttttcaaggccaaggcaggaggatcacttgaggtcaggagttcaagaccagcctggccaatatggtgaaaccctgcctctactaaaaatacaaaaattagctggatgtggtggcgggtacctgtaatcccagctacttgggaggctgagacaggagaattgctcaaacctgggaagcggaggttgcagtgagccaagattgtgccactgcactctagcctgggcaacagaatgggactccatctcacaaaacaaaggatagtttggcctaatttgatgtctctgtcttgggtgctcacttgttcttctgccatgtgatgatgcagcaagaaggcccttgccagatgccagcaccatgcttttggacttcccagcctccagaaatgtgagaataaatttcatttctttataagttacccaatctccagtattttgttttactaaaaacaagtaacagaaaacagcctaggaaagggccacgtctgctgtcctgtttcagcacaaacccctgtctggaggggatgaacacagtgtctgctctactgcacacagcctgtacctgtcccccaccactgttacctgggtacatgggcacacctggggatgcagcacttatggcttaaaaaaaaagaatcaggtgcaaaaccagaaacaaatctaaagtgtgtgaaggggaggagaaacagggcatgaatagggggggaattgccacaaacaagagaaaatagcctaacagcctggagcaaaagcaagagggagaatacagttagaaacatacccaatgagagggagaaattggtgaaggaaaaaaaaaaacatgagaaggaagaacatgagagcacgaagagaagtctgtggtggtaaaagaagtagaagatacacctgccacgctcacgcccttggaccaccaagcagaatcactgagccattgcccagcccacccctctttgtattttctcatatcctttcgaatggttcctggacacttggatttcatggtccaggaagaaaaaattaaagactaacgtaaagctgcaaagaacatgaaacttaaaatgtcttctactatgatcattacttccaaaagcaagggacattgtacgtcctcagaggaaagagcattgcttcccaagaaagaactctgtccttggccactgaataccaccctgcacgcagaacattctcctcacttctcccctttgccaaggaatgctgaaaactttgtcacaggctggtgccaggtcttaccctagcatttgggaggcactgctttagggaacctgagagtttagccacgcagttctgtagaaaaatggtggaaagctaacatttgtcgagcactgaccattgcctgcccctgtacatagtcattatctcataaaatcacctcaataacacagttctaattagtcctcctatttcaaataaggaaactgaggctcagagatgttgagaatcacgcctgcagtcaagtggtagaggaaggttttaatccaagtcacttgacttcagggccaacctttttttagttttattttttacttttttgaaaaaagtctcgctctgtcacccaggctggagtgcagtggcaagatctcggctccctgcaacctccacctcccaggttcaagcaattctcatgcttcagcctcccaagtagctggacttacagatgtgcactaccacacctggctgatttttgtgttattagtagagacaggctggtctcaaactcatggcctccagtgatctgcctgcctcagcctccctaagtgctgggattacaggcgtgagccaccgtgcccggcctccaaaccttttttaaattaaaatttttggagacaggattttgctctgttgcacagcctggagtgcagtggcatgatcacagttcactgtagcctctaaatcctgggctcaagcaatcctcgcctcagcctcctgagtagttaggactacaggcctgtgccaccatgctcaggtaatttttttaatttgtagagagatggtctctctgtgttgcccaggctggcctcaaactcttggcttcaactgattctccccactcagcctcctaaagtgctgggattacaggtgtgagccatcacatcaggcccaaggcaaacattttaaaccatgatgctgcacattacaaacatgcttcttcacagaaggagcctcctggattttctaaacagagtgaaagggtttcataaactctacatccgttttgttttttgttttttgttttttgtttttttgagacacggtctcaatctgttgcccaggctgtagtgcggtggtgtgatcatagctcaccgcagccttgacttcctcgggctctggtgcttctcccatctgagtagctgggtctacaggcacatgccaccaggcctgactaacttttgtattttttgtagagacggggctttgtcatgctgcccaggctggtctcaaactcctgggctcaagcaatcctcctgcctcggcctcccagggtgctgggattaccggcgtgagccacctcgcccggcccgtctacatcagttttgggtgtgccgcctactgaaaaattgcaagcatctgactaagacaatctttcctgaatcaggaatgcttaagagatttcaaccccgtgatggctgtgtcccttctggcctcgtccccagctgggttcactgctggctctgacgcctctgtcctggcgcggtgtcagctccccactttatatccagggtgggggcctgttctctcaagctgctattcctatctgtgtttgttcagaggcttccttcctggctctttttctactttaagatcttcccttttcagcaacctttgccttgatgtctaattccaactgtaacttaaaatcagaaccacagaaagatatgatcaggtagaagttgatttctatttttttttttttttttttgagacagagtttcgttcttgttgcccaggctggagtgcaatggcgccatctcggctcactgcaacctccacctcccgagttcaagcgattctcctgcctcagcctcccaagtaactgagattacaggcatgtgccacctcgcccagctaattttgtatttttacaaaccagtctggccaatatggtgaaactctgcctctactaaaaatataaaaattagacagggtttctccatgttggtcaggctgtactcaaactcctgacctcaggtgaaccgcccgcctcggccttccaaagtgcagggattataggcgtgagccaccgcaaccagcctggaagttgatttcttatttttctttattggagactttggttccacaaatctgtggaaaaaagctgaagcctcttaaatcattcacagaagattaagtgactggcaaacgagacattgggctttcctcctattgaaaccaagttattagtatattaatattgtatctattcaccacttgctaattctgttttactagcaatctaatagtgggggaagcttccacttaagactcttttataagcttgagggacacagagtccttattagtttaatgtgctgttatgtagatgtgaacatcagaatcatggttaggagggaatttaaaatgttcccccagcatcattccagacagatgagaagccatcctttaaaaattctccgagaagaatcttccacaatcaactattttagctcatcccagtgtttaataatcctcattgccaagaatatttttttcctttaatgcaatcctttctgctgtagtttaaattcatttcttacaggcactgttagtggagttgaagacaccatcatccatgttagtttttaatgtagacctcttatgtgcagaagaaaattctttaatcttttctcactttccaacccttagaaactaaactttcagccgggcatggtggctcacacctgtaatcccagcactttgggaggccgaggtgggtggatcacctgaggtcaggaatttgagaccagcctggccaacacggtgaaaccccgtctctactaaaaatacaaaaaaaaaaaaaaaaaaaaaaagctgggcatggtggtgggtacctgtaatcccagctactcaggaggctgagacaggagaatcgcttgaacctggcaggtggaggttgcagtgtgccaagattgtgccattgcactccagcctgggcgacaagagcaaaactccaactcaaaacaaaaacaaaaacaactaacctttccatcctcttttgtacagcccaagaatttagaaaggacatcaaatatatctggtttagtaattctcagatcaggtgcttcggaatcacctgagaattgatgcaatgagagagtcgccctccccaggtatgccccagccgaatctttgtgggtgccactccagaatggattttaacaataccgggtgatcctgatattgatgttgtttagacagtcatcgggaacccttgacccagtctagtttgttcttagatttccttatgacctgcaaacggaccacctcccacaacagcccactcgctacatccccaagaacagcttgctcatggccacagcccttccaatgggagaaagtggctcctcttcctaagccaaaatttgcgtccttgaagtttctttttctttttcttttttgagacaaagtctcgctctgtcacccaggctggagtgcggtgatgtgatcttggctcactgcaacctctgcctcccgagttcaagcgattctcctgcctcagccccccaagtagctgggactagaggcacgcaccaccctgcccggctaatttttgtattttagtagagacgaggtttcaccacgttggccaggctggcctcgaactcctgatctcaagtgatctccccgcctcggcttcccaaagtgctgggattgcaggcgtgagccactgtgcagccccttccttgaagtttctatcaattatgttagatgtggcctccagtatcagagtatttctaattctcttcattaacctttccaaccccaagaatatacaaattacatttctaggccaatatgaaaaaaaaaaaaaaaaaggaataggccaagtgtggcggctcacacctgtaatcccagcactttaggagactgaggcagaaggattacttgagcccaggaattggagaccagcctgggcaacatggcgaaaccctatctctacaaaaaatacaaaaattagccaggcatggtggtgcatgcctgcagtcccagctactcaggaggctgaggcgggaggatcacttgagcctgggaaatcagagctgcagtgagccatgattgtgccatggcactccagcctgggcaacagagccagccctggtcacatacatggtgaaacttcccatccattgtccaaaagctcttgcttaccatcagtatatcaatgagaaaagagttgtcaaagatctaactcagtgattctcaaacttgagtgtgaatcagaaccacccaaagggcttgttgaaacacagattgtcgggctccacccccagagtatctgattcagtaggtcagggtggggactgaggtttggttttctaattagtacccaggtgatgctgtggctggtggtccacagaccacactttgaaaatcactgggctaattaatgcatgcttaaggcagcatttatcagcctatggaatgagcacctgctgtatcagaatcgggggggaagctttaaaaataacatatttttatagggcttaggaatctggaattacaacaacattgcaggtaaatcctcctacagaaatttgagaaccccttgactatgggttttatagtttaaagagatttggataggccagcggttctcaaagtgtggtacccgaattacaacatcagcatcacttgggaacttgttagaaatgcaaatgcatcttttctgaaagattttatgtaaaaaaaaaaagaaaaaaaagaaatgcaatccatgttttcacaatccctctcagtattctgaggcacgttgacctttgggagccactggcacaggcgaagctcaaagaggtgccaactcctcattatttcccctgcatctgcttcttcctagtttggttttgtatttttcactagagaacatgttcatttatcctttgccatttcctaaactttgaggagctgctatgctagctggggaagacggctcccctacagaaaggttctgagtttgaaggaaccataccttttttttaaatgttttctttttcctaactctggtaaaatctacgtaacataaaagctaccattttaaccatgttaagtgtacagttacgtggcactaagtacattcatttccttgtgcaactatctccactatgcattatcttcccaaactgaaactgtgtatccattcaacagtaactccccattcagttctgcatgctaaccattgtattcatgtggttgtgcaacctgtctccagaactcttatcatcttgcaaacctgcaactctgtgcccgttaaacaagtcccctttccctctccacccagcccctggcaacccacattctgctttctgtctctatatattataaattaactattttggatgcctcatagaagtggaatcatacagtatttgtccttttatttcacttagtataatatctttaaggttcatccatgttgttatcggatggagatttccctttctttgtaaaaattttaattgtatttctatattttagaatccccttctttgtaaaggctgactcacactctactgtatgtatggaccacattttctttatccgttcatccatccatggcattggcttgtttctaccttttgactacgatgaataatgctgttatgaacacgtgtgtacaaatacctgaggcttctttgcagatttcctggctgagtccactgaggttccttagatactgccccatctcttacttgagccaaatatgaggaagataagaaattgattaataatctggcaaagtttagaattaagtcacagctaggcacattggcccacgcctgtaattccagcacttggagaggctgaggcaagaggatagtgcatgcttataatgccagctactcaggaggctgaggcgggaggaccttcaggagcccaggagtttgaggctgcagcgagtgcctcaagcctgggcgctgcactccagcctgggcgacagaacgagaccctgtctctaaaaaataatgaaaattttaaaaatgagaattaagttactagttcaggtatgggttctgggctgtagttaaatggtaagtttttctatcactcccaactcttgctcctgaaaactccctcctcaaagtatattccgcaggaaggggcgcatgcgtgtctcgtacagtgccaggctcctagcccctgggactctggccagctaaaagaagagcctggtctatgcattgaatgactaaaccataattggagctcagaatccctcagtgaagactggggtgtcccagaacatctctcccccctcgcctagtgtccagaactgagctctacctagcccttgctgcttactctgatggccatccaagccggtgctctcagcgtggagcccttcctgccgtcccaaagcccagcctttcagagtcattcctgacccctttcctggtcctgctgccttgcttttcctgctcctgatggccagctggggttttgccatatagagacttc

SEQ ID NO: 35 - DNA, 170995 bp, Homo sapiens
aagcttagagtggcacagtagattgagaaaagtaacaactgcactggcagcttctcccagcaggaggtgggggcttttatttgactccttgagtttgggtgtggccatgtggcttgttttggtccactgggcattaacaaatgtgaagaaggagaggcctggaaagctcaggtccaccaggcttgccctctcctgcgctggaatcccggagccgccgtgtgcggaaccctgggctgccctgttggagggtgaaaggccgtgtggagtaagaggcccagccatcccagctggggccatgatgtgagtgaggccccccagatcatccagcccccgcccatcaggccccgttcagaagcaattaatcccacagcaatgaatccttgttggcttaagccactatgctttggtgtggtttgttacatagcaaaagctaactgattcaagcagggcacaaaaagtgtaaatctcaaaggaaaaattaatggatttaacaacatcaaaagtaaacaccctagatgaaaggtaacagacaggagatgggctggaagaaaatattttgcagaaccaggactgaagattaaaatgtaaaaaatctaagggacacttgcaattgcaagaaaaaagttttaagtaggcaaaacctgaatgagaagtgcaccagaagtaaaaccagagtagttaataaatatgtgaagagactctcaaactcattagtaatcaaaaaaatagagtatgttaaaaatgagatactacaactattagaatggcaagaaataaaaagttgtatgatatcaagtgctgacaaggacatggggaaatgaaactcctcattacactacagatgggcaggagtcaccttctgttgtcatttgtgaaggtcagttgggaagcattttgtgaaaacatgcacatatgtatactctcatgtgatccagcagtacagttcctgggtgatatcccagagaatccttctgacagatgcacaaagagatttatgtcagtttgcagtagcatcgtctgccagtgtaagccatcccttagtgggagggtgtgtaaggaaaatgtggtatatgcataggatgggaaaaccataaggcagccagatcagtaaataagatttacttctatcaacatggctagatctcaaaaacacgttgaatgggccgggcgcggtggctcacacctgtaatcccagcactttgggaggccaaggctggcggatcacgaggtcaggagatcgagaccatcctggccaacatagtgaaaccccatctctactaaaaatacaaaaattagccgggcatggtggtgcatgcctgtaatgccagctactcaggaggtggaggcaggagaatcccttaaaccagggagttggaggttgcagtgagccgagatcgtgccacagcactctagcctggcgacagagtgagattccgtctcaaaaaaaaaaaaaaaaaaaacacatgttggatgaagaaaatcagtagaatgagatgtatagcacaatgcgcactggtaaattaaagtctatattatatagatgatgttatgtatatgaaggtatggaaggtgagttggaagaacacacattaaaacataggtactggctggatgcagtggttcacacctgtaatcccagcactttcggaggctgaggcaggaggattgcttgaaggcaggaggattacttgggccaggagttcaagaccagcctggatgatatggtgagactccatctctaaaaaaaaattaaaaaattagctggatgtggtggtatgtgcctgtggtcccagctactcaggaggggaaggaggaggatcacttgagcccaggaggttgaggttgcagtgagctgtgatcacgccactgcactccagcctgggtgacagagcaagaccctgtctcaaaaaaaaaaaaaaaaaagaagtgaaataaaacctgggtactcatgggaagagagtaagattggggatgggtcattaaaagactgtaatgaaaccaaatcagaacatttgtctcatcagtgtacttactgcttatgatgactgcatgaggtttatggatagagctgtgatttggaaaaccaagtagaaaaaatataaacaaaaaggaagagcctcctctatttaaaaaggatacaaaatacagtgacatcccccagttttggcaacattctgctggtgtcactaatatcactattaacctgtaactctaaatggacacccagcggaaaccaaaacaagacaaaaggcattgttctccttcttaaaggaagaatccatgtggggaaaaaccccaggcttattgtttaaatcatgtaataaaaggcatcatattaaaccctttactggtttctacattgcatcctgctctatggccttgctgctttttaacaaccgcttgcttaaagataaaatcagtatctatacagggcctcatacattatacctcttttgagcataatttatttcatctactttatatccaaaggtgaaactaaaactattttatattcttacctgaaaaaccactcacgcaagaatcaagatgttgttctctgagttaaggatttttcctggccccagtcctgttactttggttaccactggctaagcttttcgttgccatttgagtttgtgaacacacagagtaacccggatgagactatgggtgcaagtgtggtgggctggggtgggaactgtgtcagcaccggggtagacagaagtcaaggaacttctgtggggagctgatcagatcagccagagtttacactgtcagcatctgacctcagagttggtgggccacgatcagtgatgagtcacaacttaagaatagcgcagtggaggctgggcatggtggctcacgcctgtaatcccagcactttgggaggccgaagcggacagatcacctgaggtcgggagttcgagaccagcctgaccaacatggtgaaaccctgtctctactgaaaaaacaaaaattagccaggcttggtggcacatgcctgtaatcccagctacgtgggaggctgaggcagcagaattgcttgaacccaggaggcagaggttgcagtgagccgagatcacattactgcactccagcctgggcaacaagagcgaaactcagtctcaaaaaaaaaaaaaaaaaaaaaaggatagcacagtggaaagagatgctcaggtttagtgtagcaggggctcaatttccaacaaaggaaactgtttatatgaaagggaaaaatccctaaaacaataagaacccatcgccaacctcaaagcctatcgattggaaacaactgttcaccagacggctcagcttgatttcccagaatgtgagacaattccatgaaggaaaacaagctgatttcaaaaattagaaataactcaattaactaggatttccttttagtttggtttgctttgctttttactttaattactccataaggtccaattgctgtaatgtgagaatcctaaatgagtaaagttggatgccaagttaaatgctaagaagacctggggagaagctgggcgcagtggctcacgcctgtaatcacagcactttgagaggccgagccaggtgaatcatttgatgtcaggagtttgaggccagcctggccaacatggcgaaaccccatctctactaaaaatacaaaaattagccaggtgtggtggcatgtgcctgtaatcccagctacctgggaggctaaggcaggagaatcgcttgaagctgggaggcggaggttgcagtgagccgagatcgcatcattgcactccagcctgggcgacagaacaagactctgtcaagaaaaaaaaaagaaaaaaaaaacctcaggaaatctcagaatgatgagtgggaagaaaagtggggtgggctagtctgttggagtagtaggattacagggaatttttctctttgttttaaacttttaatattgctgttatcaagttgagcaataaataatcttttctaaatgtaagcattccttagggaaaaacaaacaaacatgctaacctttcctctccatcacgctgtggggaagcttcattggttccttaaggagactataatcaaaccacttttttcttgctcatcataaggtttaactaggggcaaaagaggacaagaaaaataattagagccataattggtgggtagatggaaacagagtcctagggttggaaggaatcttggaaatatgttttgcccatcccctcagctctcgggccacacctaaactcttaaagccctcaggaatttactgtgctgaggaccgccaaggacaatgcctaatctgtcttagaaactcattctagtgtctaagaatacttactggcaggaaattcaactttgtgagtaaattcagactccactcccatccatttcctctggctctgatttcgggtggagatggaccgcagctggacacacattcaagtacactcagcaaacacacgtgaaggttgttaccaaaatagccccctcccatccccacctcagctttctctgctctgggttaaatgatcccagcccctgtatgggataaatgatcccagaaatctctcctgatcggtttcattatctgaacttagacctacctgtgcctaatctttgaccaacagtccagtagggggttcaccaccactggctctagggtgatcaactgtcgcagcttgccagaggttgcccaggtgggacttttagtgctaaaaccaggaaagtcccaggtaaactgtgataagttggcctagctggctgtctctggggaaaaaaatgcaaccaccggaggaatgatcttcattgctaaaatgcaatgttacacgacgtgtcatgaatatggagacagaaccatctgaaaagctgctgtggtttgaacgtccctccaaaactcatgttgagatataagtgccattgtaacagcattaagggtggagcctctagagaggtgattagatcatgagagctctgccctcatgagtagattaatgccgttattgagggaatggttagttatcacctgagttggttcctgattaaaaggatgagtttggctgggtaccatggctcacgcctgtagtcccagcacttttcaaggccaaggcaggaggatcacttgaggtcaggagttcaagaccagcctggccaatatggtgaaaccctgcctctactaaaaatacaaaaattagctggatgtggtggcgggtacctgtaatcccagctacttgggaggctgagacaggagaattgctcaaacctgggaagcggaggttgcagtgagccaagattgtgccactgcactctagcctgggcaacagaatgggactccatctcacaaaacaaaggatagtttggcctaatttgatgtctctgtcttgggtgctcacttgttcttctgccatgtgatgatgcagcaagaaggcccttgccagatgccagcaccatgcttttggacttcccagcctccagaaatgtgagaataaatttcatttctttataagttacccaatctccagtattttgttttactaaaaacaagtaacagaaaacagcctaggaaagggccacgtctgctgtcctgtttcagcacaaacccctgtctggaggggatgaacacagtgtctgctctactgcacacagcctgtacctgtcccccaccactgttacctgggtacatgggcacacctggggatgcagcacttatggcttaaaaaaaaagaatcaggtgcaaaaccagaaacaaatctaaagtgtgtgaaggggaggagaaacagggcatgaatagggggggaattgccacaaacaagagaaaatagcctaacagcctggagcaaaagcaagagggagaatacagttagaaacatacccaatgagagggagaaattggtgaaggaaaaaaaaaaacatgagaaggaagaacatgagagcacgaagagaagtctgtggtggtaaaagaagtagaagatacacctgccacgctcacgcccttggaccaccaagcagaatcactgagccattgcccagcccacccctctttgtattttctcatatcctttcgaatggttcctggacacttggatttcatggtccaggaagaaaaaattaaagactaacgtaaagctgcaaagaacatgaaacttaaaatgtcttctactatgatcattacttccaaaagcaagggacattgtacgtcctcagaggaaagagcattgcttcccaagaaagaactctgtccttggccactgaataccaccctgcacgcagaacattctcctcacttctcccctttgccaaggaatgctgaaaactttgtcacaggctggtgccaggtcttaccctagcatttgggaggcactgctttagggaacctgagagtttagccacgcagttctgtagaaaaatggtggaaagctaacatttgtcgagcactgaccattgcctgcccctgtacatagtcattatctcataaaatcacctcaataacacagttctaattagtcctcctatttcaaataaggaaactgaggctcagagatgttgagaatcacgcctgcagtcaagtggtagaggaaggttttaatccaagtcacttgacttcagggccaacctttttttagttttattttttacttttttgaaaaaagtctcgctctgtcacccaggctggagtgcagtggcaagatctcggctccctgcaacctccacctcccaggttcaagcaattctcatgcttcagcctcccaagtagctggacttacagatgtgcactaccacacctggctgatttttgtgttattagtagagacaggctggtctcaaactcatggcctccagtgatctgcctgcctcagcctccctaagtgctgggattacaggcgtgagccaccgtgcccggcctccaaaccttttttaaattaaaatttttggagacaggattttgctctgttgcacagcctggagtgcagtggcatgatcacagttcactgtagcctctaaatcctgggctcaagcaatcctcgcctcagcctcctgagtagttaggactacaggcctgtgccaccatgctcaggtaatttttttaatttgtagagagatggtctctctgtgttgcccaggctggcctcaaactcttggcttcaactgattctccccactcagcctcctaaagtgctgggattacaggtgtgagccatcacatcaggcccaaggcaaacattttaaaccatgatgctgcacattacaaacatgcttcttcacagaaggagcctcctggattttctaaacagagtgaaagggtttcataaactctacatccgttttgttttttgttttttgttttttgtttttttgagacacggtctcaatctgttgcccaggctgtagtgcggtggtgtgatcatagctcaccgcagccttgacttcctcgggctctggtgcttctcccatctgagtagctgggtctacaggcacatgccaccaggcctgactaacttttgtattttttgtagagacggggctttgtcatgctgcccaggctggtctcaaactcctgggctcaagcaatcctcctgcctcggcctcccagggtgctgggattaccggcgtgagccacctcgcccggcccgtctacatcagttttgggtgtgccgcctactgaaaaattgcaagcatctgactaagacaatctttcctgaatcaggaatgcttaagagatttcaaccccgtgatggctgtgtcccttctggcctcgtccccagctgggttcactgctggctctgacgcctctgtcctggcgcggtgtcagctccccactttatatccagggtgggggcctgttctctcaagctgctattcctatctgtgtttgttcagaggcttccttcctggctctttttctactttaagatcttcccttttcagcaacctttgccttgatgtctaattccaactgtaacttaaaatcagaaccacagaaagatatgatcaggtagaagttgatttctatttttttttttttttttttgagacagagtttcgttcttgttgcccaggctggagtgcaatggcgccatctcggctcactgcaacctccacctcccgagttcaagcgattctcctgcctcagcctcccaagtaactgagattacaggcatgtgccacctcgcccagctaattttgtatttttacaaaccagtctggccaatatggtgaaactctgcctctactaaaaatataaaaattagacagggtttctccatgttggtcaggctgtactcaaactcctgacctcaggtgaaccgcccgcctcggccttccaaagtgcagggattataggcgtgagccaccgcaaccagcctggaagttgatttcttatttttctttattggagactttggttccacaaatctgtggaaaaaagctgaagcctcttaaatcattcacagaagattaagtgactggcaaacgagacattgggctttcctcctattgaaaccaagttattagtatattaatattgtatctattcaccacttgctaattctgttttactagcaatctaatagtgggggaagcttccacttaagactcttttataagcttgagggacacagagtccttattagtttaatgtgctgttatgtagatgtgaacatcagaatcatggttaggagggaatttaaaatgttcccccagcatcattccagacagatgagaagccatcctttaaaaattctccgagaagaatcttccacaatcaactattttagctcatcccagtgtttaataatcctcattgccaagaatatttttttcctttaatgcaatcctttctgctgtagtttaaattcatttcttacaggcactgttagtggagttgaagacaccatcatccatgttagtttttaatgtagacctcttatgtgcagaagaaaattctttaatcttttctcactttccaacccttagaaactaaactttcagccgggcatggtggctcacacctgtaatcccagcactttgggaggccgaggtgggtggatcacctgaggtcaggaatttgagaccagcctggccaacacggtgaaaccccgtctctactaaaaatacaaaaaaaaaaaaaaaaaaaaaaagctgggcatggtggtgggtacctgtaatcccagctactcaggaggctgagacaggagaatcgcttgaacctggcaggtggaggttgcagtgtgccaagattgtgccattgcactccagcctgggcgacaagagcaaaactccaactcaaaacaaaaacaaaaacaactaacctttccatcctcttttgtacagcccaagaatttagaaaggacatcaaatatatctggtttagtaattctcagatcaggtgcttcggaatcacctgagaattgatgcaatgagagagtcgccctccccaggtatgccccagccgaatctttgtgggtgccactccagaatggattttaacaataccgggtgatcctgatattgatgttgtttagacagtcatcgggaacccttgacccagtctagtttgttcttagatttccttatgacctgcaaacggaccacctcccacaacagcccactcgctacatccccaagaacagcttgctcatggccacagcccttccaatgggagaaagtggctcctcttcctaagccaaaatttgcgtccttgaagtttctttttctttttcttttttgagacaaagtctcgctctgtcacccaggctggagtgcggtgatgtgatcttggctcactgcaacctctgcctcccgagttcaagcgattctcctgcctcagccccccaagtagctgggactagaggcacgcaccaccctgcccggctaatttttgtattttagtagagacgaggtttcaccacgttggccaggctggcctcgaactcctgatctcaagtgatctccccgcctcggcttcccaaagtgctgggattgcaggcgtgagccactgtgcagccccttccttgaagtttctatcaattatgttagatgtggcctccagtatcagagtatttctaattctcttcattaacctttccaaccccaagaatatacaaattacatttctaggccaatatgaaaaaaaaaaaaaaaaaggaataggccaagtgtggcggctcacacctgtaatcccagcactttaggagactgaggcagaaggattacttgagcccaggaattggagaccagcctgggcaacatggcgaaaccctatctctacaaaaaatacaaaaattagccaggcatggtggtgcatgcctgcagtcccagctactcaggaggctgaggcgggaggatcacttgagcctgggaaatcagagctgcagtgagccatgattgtgccatggcactccagcctgggcaacagagccagccctggtcacatacatggtgaaacttcccatccattgtccaaaagctcttgcttaccatcagtatatcaatgagaaaagagttgtcaaagatctaactcagtgattctcaaacttgagtgtgaatcagaaccacccaaagggcttgttgaaacacagattgtcgggctccacccccagagtatctgattcagtaggtcagggtggggactgaggtttggttttctaattagtacccaggtgatgctgtggctggtggtccacagaccacactttgaaaatcactgggctaattaatgcatgcttaaggcagcatttatcagcctatggaatgagcacctgctgtatcagaatcgggggggaagctttaaaaataacatatttttatagggcttaggaatctggaattacaacaacattgcaggtaaatcctcctacagaaatttgagaaccccttgactatgggttttatagtttaaagagatttggataggccagcggttctcaaagtgtggtacccgaattacaacatcagcatcacttgggaacttgttagaaatgcaaatgcatcttttctgaaagattttatgtaaaaaaaaaaagaaaaaaaagaaatgcaatccatgttttcacaatccctctcagtattctgaggcacgttgacctttgggagccactggcacaggcgaagctcaaagaggtgccaactcctcattatttcccctgcatctgcttcttcctagtttggttttgtatttttcactagagaacatgttcatttatcctttgccatttcctaaactttgaggagctgctatgctagctggggaagacggctcccctacagaaaggttctgagtttgaaggaaccataccttttttttaaatgttttctttttcctaactctggtaaaatctacgtaacataaaagctaccattttaaccatgttaagtgtacagttacgtggcactaagtacattcatttccttgtgcaactatctccactatgcattatcttcccaaactgaaactgtgtatccattcaacagtaactccccattcagttctgcatgctaaccattgtattcatgtggttgtgcaacctgtctccagaactcttatcatcttgcaaacctgcaactctgtgcccgttaaacaagtcccctttccctctccacccagcccctggcaacccacattctgctttctgtctctatatattataaattaactattttggatgcctcatagaagtggaatcatacagtatttgtccttttatttcacttagtataatatctttaaggttcatccatgttgttatcggatggagatttccctttctttgtaaaaattttaattgtatttctatattttagaatccccttctttgtaaaggctgactcacactctactgtatgtatggaccacattttctttatccgttcatccatccatggcattggcttgtttctaccttttgactacgatgaataatgctgttatgaacacgtgtgtacaaatacctgaggcttctttgcagatttcctggctgagtccactgaggttccttagatactgccccatctcttacttgagccaaatatgaggaagataagaaattgattaataatctggcaaagtttagaattaagtcacagctaggcacattggcccacgcctgtaattccagcacttggagaggctgaggcaagaggatagtgcatgcttataatgccagctactcaggaggctgaggcgggaggaccttcaggagcccaggagtttgaggctgcagcgagtgcctcaagcctgggcgctgcactccagcctgggcgacagaacgagaccctgtctctaaaaaataatgaaaattttaaaaatgagaattaagttactagttcaggtatgggttctgggctgtagttaaatggtaagtttttctatcactcccaactcttgctcctgaaaactccctcctcaaagtatattccgcaggaaggggcgcatgcgtgtctcgtacagtgccaggctcctagcccctgggactctggccagctaaaagaagagcctggtctatgcattgaatgactaaaccataattggagctcagaatccctcagtgaagactggggtgtcccagaacatctctcccccctcgcctagtgtccagaactgagctctacctagcccttgctgcttactctgatggccatccaagccggtgctctcagcgtggagcccttcctgccgtcccaaagcccagcctttcagagtcattcctgacccctttcctggtcctgctgccttgcttttcctgctcctgatggccagctggggttttgccatatagagacttccgggggtcactctggacttcagtccacattccctgcctccatcctccaatagcggcggcgctcctgcctcgcctgtctttggcctctgggagctgcgctcagaattagcacggagagaccccggcctgcgtcactctgctgtgcatcacgtctggagctcaggttgtgcaggaagttggaaagaggacagaacacatactcactggttgatctgcagcttcgtggccttcgtgccggcaagccacagctgtccaagcaggcctgcggggcggcagaggaaactgtgagatgtaaagtcttctggactcagaaggcggtgggttggggccagatgtgagtcaagagatgcggaagatgtttcatattccccttgattcgtaccagctgccctgggaacccacaaatgggactgatggtagatgtttattttccaaaggacactttcctcatttatcttgaatttgtcatttaaattctttgggggagaattaaaaaccctgctggtgaatgaaagacaattcctaccaagtgaaacttaccattctagaaatgattagccatccccttcaccctcacctaaccatctagatgttttggtccagtcgccaaagcttggatttgagctctaggtcgaggatgctgtggtctcctcgcatattgaagactgtgccagttcaacaagtctgactcccatcagtctttcaggctcctgtcatagcagtaggaggagtctggaagacaatgttaggtgctgggatctctgttgaagtcagtggaatgtggagagtttagaatcaaagcatttgccagaattattctgatactctagaggatttgctgtatggatatgctatactagtatgtcatttataaaagcgtgtttaggctgggcatggtggctcacacctgtaatcccagcactttgggaggctgaggcgggcggatcatgaggtcaagagatcgagaccatcctggctaacacggtgaaaccccgtctctactaaaaatacaaaaaattagctgggcgtggtggcgggcacctgtagtgccagctactcgggaggctgaggcaggagaatggtgtgaacccgggaggtgcagcttgcagtgagctgagattgcgccactgcactccagcctgtgcgacagagcgagactccgtctcaaaaaaaaaaaaaagcgtgtttagtattttcatctttataatatttattgagagctacgcatttatagcactgtgctgaaactctttatataactgacgcctctggctaatatctttcattggccacgtgagcttcaatttgtatactgtgtgaaagcagtgaaatttttgactttcaaataccgttcttcagttgtcagcaggataataaagtattcagaattagtttggtaggcaatgcttactgggcatattattgccttttgcttctctattgctacttataacacattaaagaaaattatatttttggaacccattttcacacacacacacagtttggaagagagaaaagagatggagctattttaggatctgtattttcaaagaatagcaactctctaagtgacaagagagcaagtagaaccaactttataattaaaggatggtgtaggttgtagaaaagggatgatacaggtttggaatgatgaataagacagtccttactcttaataagcttgcgttctagtggagtgtgggagaccaatacatcaaaatagtagtgaccacatgtccccagtccaaatttgggacatgtggtctcaaaagaatgagtgcactttctggggacaactggaccacctgtttgaaatgttagcagatttaggacatgtagttgccatacttagaacagaagatggggtaagaaaagctgttcaggaggcatgtgtagttgctatgcagcttcggggaggaagcgctcacagcatcacactctccttcaggctccacgaagcagctagctcagcgcctacttctggatcgtctaccctttgccaggtactaaactaatggttgccgtgccatgctccagagcagctatgcacttccctttaaaccagtcacatgcgtgtgtgagctggctgtctgggcctgggtcttgaagaaacttccctctttcggttcatacacatgtgtgtgcaaggagactgtcggggtgaagaggctctgacactttagggtggcatcaggggcacaggctctcccctaaattcaacttcagaaatacagatttaaaacaattcttttgagaaatattgcatatctatgaaaccaaaaaaaaaaaaggagaagaaaaacaaaagaaagaaaaaaatccggcgggtggatcacgaggtcaggagattgagaccatcctggctaacatggtgaaaccccatctctattaaaaatacaaaaaattagccgggcgtggtggtggacacctgtagtcccagctacttgggaggctgaggcaggagaatggcgtgaacccgggaggcagagcttgcagtgagccgagattgcaccactgcactccagcctgggtgacagagcaagactccatctcaaaaaaaaaaaaaaagaaaaaaaagaaaaaaaaatccatttgacatgaaggggactggatattcatatattgctagtggtactaacaatagatgtattctttatttattttttttttttttgagacagagtctcactctgtcacccaggctggagtgcagtggtgcgctcttggttcactgaaacttccaacccttgggttcaagcaattctcatgcctcagcctcctgcgtagctgggattacaggcatgtgccaccacgcctggctaattttgtatttttagtacagacagagtttcatcatgttggccaggctggtcttgaactcctgatcttaggtgatccacctgtctcggcctcccaaagtgctgggattataggcatgagccaccatgcccggcttgcgtattcttatagaaaaggaatctgacactatgtgagagggcatcaaacactttagaccctttgatccaatagtttcacttgggaaaacgtacctcaaaatgaaaacacaaaacattgattttcttttctataaaaaaatcaattgcagcactgtaaaatgaacaatgggaaacaaccaatactccacaatgggaaaacattaattaataaaatctttttagcccctagacatcgtgagagtacaccagtaaatgagaatgtgtagatgaaatatttagtgaagaaaagtagaacatgaaattatatgtacatactgattacaaccttgtaagctgatggagataccaatttatatccaaagagactttttaggaaaggaacagctgtttagtattgatgagatttttctgtaagttgttggcattgatatttttttaagaaggaagagtgagtatggcaggggtgttagttgaactatgagtcttgaatctcactgagttttttgttggtttatgttattgagaggcatggtgcaagtactttgtgactaagagtgaaaggaccattctttggtttattataatatattaataaactagaggtgattcaagtgtctctacaatgaagtcactaccacacgcttgcattttgagatgctttctttagtggcggcagaagggacagagccacttgccactttgtagttattattggctcctggtcctgcaagtgtgaatgtcagctgtcattcacatgagggaagttggaactgacgaactgtcgtgatgtgtatgacagtcttgttccctaatcattaataccatgccacctgatctcttcagtctcagaaataattacatttcctctttccttctcatgtgaaagcctgcccactggagtaggcaggagagtaggtccttcctaccccctctcttgccaacaggaaggcctctcagctaagatccccaaaggagcagtgcccaggtgttctctgcagcttccccgtcttgacgacctcctagttatgacatccactaaatgctttccttgagctctctgcagcattgcatgctggaaccactcgtctccttgaaactttccttggggttatgcctgactctagcacttaggagaagcttatgtagaagatcaggcaaaaaagggcttcccctccgcggaaggctggcacttctgcactccctcggggccaccctgataccatgcagagaacagagtagagaggcagggttcaaccccccatggggctgcttccctgccagtctgtctggcatcctaactccataaggtggcagcagggcaggagatttctgacaccagagagacctgacagcaagaagcctgcagaagcagccagacccagccagacccagacccaggattgagagtgggtctaggaaccactcctctgtgcacttaagctgcagccaggccattcggaaggaagtaaggacatttccccctggaatcgcctagcttctgtcagctctgtgtgacatggatggaaatacatcccacttgccttgctagcaaaactccccacccctgcagagtcagctgcaggaacggaggcagccaggatggtgacgcaggagggagggcggcctcccccactccacggagggccgcaggagccagcgggcagcagatctttagcctgtaaaggagaaagcagccaacccgagccaggtcgggcctccccagcaacaccctgtgttgtggttctgtcccgcagtcagaggctggtccctgacttccctggtttcacgtgataacctgggtatgaacaggcaggccctgactgctgcggacaggggaacagggaggccccagctgtcctccccaagtcgtgtggctggtggtggcagagaggccgctgacccacagattcccctgtcacagcccctggaggggtggccactcgcactcctgtgtgcaactctccccgaaggcttatctctgtttgcaatgaggagagactcctttctgggtttcccgtcttaatcctgcgcctgcaggaatgcgctggtcagcttttcccaggaagcccgggtctctgtggctttagagttggacgtcctggtggtggtctcaaggagcgcccagggcaggagactgagaaggggaggtggagaggggcgcgtgtgtgcaggcgccggtggggcgtggggttcaggacacagcctgacccgatcctgtcgccggggcaggaatgtgagccctggcagcggcaggcccagtgggtcttgaggggaacaatacctgagcccgtcacaggccactaatgggctccttggaactgaagaaagagaaagaaagtcgcttctcccacgtgtgaacgtgcaaggacagcagcctcagagcaggcgctggcgagtggctttcccgctccccttcacctgctgatgggagcctttcccagctgctggagccggggagtaggcggcaggtgggccctgtctgcaggctgcagggacggcggtggagggactgggctccctgcactaaggcagcggcggcccctgtgacactgaccggtgaaaaaggctagataatccccaggtctcagggcagagccttacttgggcaattagcccatcccccaaacagccggtttccacctcctcattttctgtctttctctgcctgtgacttctctcccccgcattcacggccttattccacctttcaaggtcctctcctgttctttctttttccgctccatgcccctttgctctttctccctcctcctcttctctgatgccgtcagctcctggttctaactaaatagaatgtgcagcttgtagcctaatgatatccagccccagggatttgacaaaacacaaaacagaaacaaacaccagcccgcccaatcccaaatcccaccatcaccaccccacagctgcgctcacgggctaccacggcggtgaacagctgcctccgatctgctgtcgttccctcttttccaaatgacatcttccaatatcaaagacactgccagctgtcaaaataaggcttcatattttcacatataggacaattactgctgaaaacagattatgcaaacacataaacaagtgaagtggaggaaggggaggctggtgggttgcttcctccaaattcatcctttttacagaagcagggactgaaatgacctccaggtccttagaatagcaactgacaagcacatcctcccagtcataaagcttgcatcaaaggaaaataggaagagggataagagtttgatctctggaggagaaagacaggggaggatgcaaagtgcctgagacaaagagaaggcaaagcctgggagttaattattcgttctgccccccccacccccaaccccaacataacgatgcgtaatgagcatggaagacagcaaagtgaatttctaacaaagaaaatgaggcagcaaagacagggcaacccagggaaactggaggaataagtagggtgaccttcttctgcattccttaatgtcgtcctcccttccttgagaaataccacgaatgtacccatctccctgctaaaatgacaaacagctgttaacatcaaactaaaggcccggaataggactggaagttagggaatgaaggttcttagtcttgccctgtaatcctgaacagaaagttgaaatgttctgtgtctgtttcgccagttatgaggtggaatcctaaaaccagaccccaggattgtgctgaggatcaaatgacatcatggttgggaaaacagcatgtgtccctcaaggagccctccatgggggcgagtggtactgtgtatgaaaatgccaacacattggcagcttgttgaagtgactgtgtttatttttaaatgtcattgaatttcatataacataatgatagtctgcagtgtgtgttcacagcacctgccccacccacaacttctacaatgaagccatccagcctacaatcaagcaacaaggtcaaaatcagatcaacatggggaaagtactcagctgcccagctttaaggggcgggggagggccttgccaccccctggcaattaaggccttggggctttggtcttttgggcccaactgtagctattgagagctggcatctccaaagctgtggtgacccagatgcacagagaggcaaaatcactcatctctaagacaagagaccccagagtgggaattgatgggcagcccccaggggttctgcaggaagtgtatcatcataaaaatctcagcctaggcttggcgcagtggctcacacctgtaatcccagcacttcaggagactgaggtgggtggatcaccagaggtcaggagtttgaaacaagcctggccaacatggtgaaaacccatctgtactaaaaatagaaaaattagccgggtatggtgccgggcgcttgtaatcccagctattcaggaggccgaggcaggagaatctcttgaacctgggaggcagaggttgcagtgagctgagatcatgccactgcactccagcctgggcaacatgaatgaaactccatctcaaaaaaaaaaaaaaaaaaaatcccagcctaataaaaagggacatgtcactcttaaactaagattgcagggagttttggttccgcattaatcctgaggttttttttttggttttttttgtttgtttgttttttgagacagagtttcactcttgttgcccaggctggagtgcaatggcgtgatcttggctcaccgcaacctacgcctcctgagttcaagctattctcctgcctcagcctcccaagtagctgggactaaaggtgagcgccaccacacccggctaatttttgtatttttagtagagatggaccaatcaccatattggtctggctggtctcgaacttctgacctcaggtgatccacctggctcagcctcccaaagtgctgggattacaggcgtgagtcaccacgcccagcctaatcctgagatcttgtaacacatctggagagccaggtggctttacctttgataagggcaccagcagacatgtggctcaaccctcccagcagaaagaaactctggaagtcagatacagcaaccacagaactcactttagtgcaaagaagtcaggtcacatggggatccccaaattctcctaccacccataggtggtcagtgtaatgatgatggtcccacattgtgaggctaggagaatgtctgtagggctcaggacagactggggacaagttaccaagaataatgctgcccctgccactgctgaaatgtgttggtccaggactcaagtggaggaagtggctctctttctgcccatgcagaaattccatttttgttccaccgtctatagaattgatattggcagtggttacattaatcatttattacatggattgtagaatgcagagaactatctagaaaggatctcaacataaccaggggagaaatagactctgtgatgagcaagtggtttccgaaggggccctaccctattgtttctggggcagtacctggatgtggctttggaggaagtggaaacacttcaggccttgtgtttagatagctggagggtattaggtgggcgcatatttgaaaccatatcctggaaggtgagttcacggggcctcttaggtccatgcctttgctaagtgaagcgagctgtcccactttcagccatggtgtatcacacaagagacaccctcccccagctgactagaacagaaatgacccaatccaaggggaagccagtcacaagatggtcactgttacgggttgaatatgttgaagtcccgactccctaaatctgtaaatctgaccttatctggacatagggaaaattcctttacaggtttcagagggagcatggccctgctgccaccttgattttggacttccagcctgcagaactgtgaggcaatacatctgtattgttttaagccagtctgcctatggtaacgaatacagccaggtacatgcctacagtgtggcccagttccaaaagctaaggagacctgtcacgggttgaatcgtgtccttcaaatttatatgtcctaacctcctgtacctccaatttgaccttatttggaaataggatcattgcagatgtaactaagatgaggttatactggagtagggtggccccaatccaaacacaatgggtgtccttctaaaagggggaacatttggatacagagacagacacagggagaatgtcgcgtgaagaggaagccagaggtcagggtcatgcattacaagccggggagtgccaaagatcgcccgcaaagcaccggaagctggggggaggctggaacagaagccctggccccgccctcaggaggagccagccccaccagcaccttgatctcgcactgcggcctccagaactaccgggcggcttttaagccgcccagttggtggaacttttattacagcagccctagagagcgaatgcagggctagtgcagggctccctcctgggaaatgagctaagaaataccacgagaacaaggcagtttccgatgaagggtaatcggagaggtctagagacagcaccatgggccgcattggtacccagcagtaggcagaggagagaggggcatgcatgggaggatgtccagggggaagcacagactcatgaaggaacgccccggcctgtccacagagcccttcccaccctgacggcaccccctccagccatctggtctcaagcgatcctcttgccttgacctcccaaagtgctggcactacaggtgcatgtcactacacctggccaccaccaccgcctcctcctcctcccccttctcctcctcctccttctttttttttttttttttccccagtaacttaagcctcttgctatggaaagagcctaactagagcaagtagaatgggccctattggctcaggaaatgctaatattctatgggtaatgggaatctggtgatataacaactgtccagaaattgggccttctgtgttgttatccaacacaaaagagtatagctttctcaggatctccagccccaatacctttcaacaccctaatgagtgcactcactgctttactttgatgttccttattcctgttatcattaataagattaagggcttcttttattgtggctactgctggagactttccatattttctaagctgaaaagcgggaaggaggggaagagggagagcaaatggatggtttccttttcaaggagagaatggggcttgaaacaatcgctgagtcttcccagcattaaatgaaaagagaaaaagccaggtactcctgggggacctagaggagggcgcttttggccagcgagctatttcaaggttctgccaattccccaaggggtatttgcagcaagaccttgccagaaccctctagagcctcctagaatgctgtctgttccccacccccaccccccaccagctaaaccctggtgctttgtaggagtgactcactcctgaggatccaataatgactcctagaactctgtccacttggacaagttgcccctatgctctgttcacaggcataagtcagtgtttagagttgggaatggttgtttatttggagattaggactttctcatgaggttgtgggggtggggagagcgggggccctagaaattctagatccaccacaggccaggcctggctttttagacttgtgttaggtgagtacaaaagaggagcccctgggagcatcccagacagggctaaaccgttggattgatgatacacttgattccaaagggctcgctagcaggctggtgacctacttagcgctgtgtggggcagcggggtgcacctttatgagccctaaatagggactgagtagcgcaggaacgccaggccactggctccctgctgatgagtctggccccacacacttcaatcctaatagtttctcctttgtcctggtgtccaggcaaccggcgagggagattgctgaccaagcagtgagatgccgcagtggtggcgtggtcacttggttcttcataactgggagctgtgagtgcaggtcacaccagggcctctgtaccgcttccatcccagcccccacttccagctcaccttagctccgggagaaaagggggatgtggccgggcacggtggctcacacttgtaatcctagcactttgagaggccaaggtggatagatcatttgaggtcaggagttcgagaccagcctagccaacatggtgaaaacctgtctctactaaaaatacaaaaattagctggatgtggtggtgggcacctgtaatcccagctactcgggaggctgaggcaggagaatagcttgaacctgggagatggaggttgcagtgagctgagatcgctccattgcactccagcctgggagacaatagcaaaactccatctcaaaaaaaaaaaaaaaaaaaagaaaagaaaagaaaacagggatgccagtgagatgtgggggcccttgggcagggggtttaacctgggggctttggatgggtttcttagagttcaagacccctagaaatgccaggcaacaccttgtggacacgtgcatttatcttgaagatatctgtgacttccaaagggttaaaactactgacatacaagtctccttgatagaaacagcaagcggatggggctcccaggggtctgtgggtcagagttaggcatgcatgtggcccctgtacttcctgactgctgtgctagcagctgggagttgccatcagaattgcatctcattgcaaattaaagggcagattcaaaaaaagaatcgcgtccctgtcactgagcagttttgtgaccctgagtttctgaccctctttgaagaaggacaaatgtgttcactggatgttgaagatcaaactccttcccaaggagcacagagtcttttgtggcttctgctgcgcttctcctcctcctcctcctccttcttcttctccttctccttcccttctcctcccttctccttctccttctcctcctcctcctcctcttcctcttcttcttttcttcttcttcttcttcttttttttttttaagacagatttttgctctgtcgcccaggctggagtgtgcagtggcgcgatctcggctcactgcaacccctgcctcccaggttcaagcaattctcctgcctcagcctcccaagtagctgggactgcaggtgcatgccaccatgcccagctaatttttttgtattttagtagagatggggtttcaccgtgttgcccaggctggtctcgaactcctgagctcaggcaattcacccgcctcagtctcctgaagtgctaggattacaggcgtgagccactgcacccagcctgactgtggcccactttcctacccacacccccaattgctgaaatttcctacattcaaaacctcttctgtgaatgttctcatccaaaatctggcttcatcccgaggacactgcagctcctgagccctctcagcaaatgcctgtcctctctcctccgccagagcgggcatgttccttccttgctgctcccaggactcccctcctcctccctcagcccatctctcccctgccccacacacccctcctaccctcagacgtggtgattccaacacccacaaacatgacatttgcaatccccgagctatgcctctccttgctctccccgcctcccgcaatcttctaatccacccgactctgctcctcactgtcatggggaaccctagtagcgcaaacctgctgtcggacggcacctcttacctttccagcccactctctcactccctctgccctcagcaatccttgagtgcagggcgacctttcggcccattgatccaccttctcagcagcatcctttaccccctccaaatctcacttatctgcttaaaataaacttcctggtttagcactacagaaaattcctttttttttttttttttttttaaagatatagggtcttgctctgtggcccaggctggaatgcagtggcacaatcgtggctcactgctgcctcaaactcctgggctcaaatgatcctcctggctcagcctcctaagtagctagactaaccagcacaccccaccatgcctggcaattttttttttaataaatgggggtctcactatgttgcccaggctggcctcaaattcctggtcacaagctatcctctggcctcaggtgtagctgggattacaggcatgagccaactctcccagcctcaagaattcctttcttaacacccttagatccctcgttttttttctccatcatgccttcctgcagaaccccaagtttggttaaatccagctcactgcctgctccaggcctgcacccacacagctgtgctcggctgaagaaaggcacacagccctggtggggtggtctcacatcagatgaccacaggcatccaggggcccttcccattgcccagcaatccggtccatcccccatcttggccacccctgcacacatttccctctcagctcagcccctgcattgcctcttcatcttcacgctcagttgctgacctggctttaatttcactttacgaatttcacctcccaccttgcagcatctatggccacgtcatcctctgtcttctttcaagctgctttgagtgaattgttcctgctcccctgggcaccagatcccagcctatttctctgctgtcctttagagcaagactattctgttcacattcacactcactccattttcttcgttgacccaacccacctcaatcagactttccctccactacttggtggaagctactcttgtcaatgactcccctcatcgaccgatcggcaccacttgaattagctgagcccacctcctccttgagacgtgttcttcatgcgtcttcccagacatcacactcttctagattttccacccacctcccagacccttcctgtacatctactggctggtgccttcacctctccctggcccccggagtggcccagggctctgtctctggccctcatctcctctctgtctgcatgggccagcctcctaatgcatgttgcctatatgctgatgttcctctggcatctctccagcctcggccactcccttgagaaccatatttttttgtttgtttgttttttgttttgttttgtttttgtttttgctttttgacagtcttgctctgtttttcaggctggggtgcagtggcacaatctcagctcactgcaacctccgcttcctgggttcaagtgattcttgtgcctcagcctcctgagtagttgggattacaggcacatgccaccatgcctggctaatttttgtatttttaatagagatggggtttcaccgtgttggccaggctggtctcaaactcctgacctcaggtgatctgtctgccttggcctcccaaaatgctgggattacacgtgtgagccactgcgcccggccgagagccacactcttatatccaatgacctagtctatgtctctgctagggttcctagcaggcacctcaaacttaacatgcctttcccagccagagtgttccctgagaacttaagcagaggctctattcttacagctgttgaagccaaaaaaacaccgagtgtgcctcaacgcctctccttcctctcccaggccacgtccaacccatcagccaattctagtggctttactttcaaactacatctgacattcacgacttatcatcatctctgcaagccccaccctgctctaagccactgcgatttctttcctgggtaattgcagcagcctttcagaagctgcctttgtgtggctgctctgttctcagcatggtggccatggggaactcttcaaacgtctaagtcagagcatgtctctctcctgctcacagctctccaatgtcctcatgtcactcagagtcaaagccaaagtcctcagagaccctctatgacccggtgccctgttaccttctgacgaggattctctctcaccatgcctgtctctgctatgcggacccctttgctgttctagaaacacgtcaggcccactcccacctcaatgactgtgcgtgccgttctctctgcctggaatgtgttctctcacgtgtccccaggctggacctttgctcagatgccaccttcttcccgaggccctccctggtcactttcctcccagctgccctctcctcgccctgctccttaccccaggccgccccatgttcctccataccacatgacacgattgcacctgacccgttttccctccatgctttgtggccgtctgtcctccgccagattcataggaagggggacagctgtgtgtcttttggtcagtgttgcttcctggcatctgggaaacctgtgagtctctgtgccatcggcagagtggtgagctgttctatggggcagcaaaacttggtaaaaccattgccggtggagacctgaagggcagaccacatgccccctgagctgtggggagactctggggaggagactggcgactggcagggaacagggtgtattgctgtcactggcggtgctaggccaggtgttacaagaaggacagaaggctaggaaggacaggccagttggccagaagtgaggcaagtgggtgggagagagcccagaagtgtggaggtggcagagttggaaaagttcattgcttctaaattccaagctgccagagataaaagatggaaaagaactttgaacagcaaaggcccaggaaaacatcttggttggacctgcccccttgctagggcaggggaccctcacaacgcctgcgtcacagaaaggagtcggtcacttctacgaattagggctattgcccttcctcttctcaatggaaattgcatcatttctacttcaccactgtatgtggggtgttgggatgggggcgcatatgtacccctttagttcattggtcaccagaacaataggatcagtctctagtcctaaggaagaacatgcgtgacagagatcctggatacaatgactgatgggacttcgggttgtctcctcagagaaggggatgggtgtgtctgcagctgggaagaagaatgaagtggtttggtgaccagaagggtgtcctgtggcagatgtgttccagtcttctttgtagttgagtggggctgtattcccagtttaggctgatgtaatacaagcaaagactggtccataaaaaatcaccgttgtataatccttccttttatctcctcccatggggaccttgaaggccacatgtcaaggatgtcagtgtcacgagatggatgtagcctaggtccttgaatgatgaaatgacacagagccctatcatcccttgataacccctgccctccccctacctctgcctcagaacatgctgtacttgcattggaagccacacttttattgtgttgggtcgctgagctttcagggttgttagagtagttagcctagcctagctcatacagcaggtgctcaataactatggtaacaatcttcgaatttcagagcccacacttctaaccaccaaacctctcttgctcggcttcctgtatgctttcccctccatttcttcctgaaagaaaattcttttcttaaaaataataggtactagaactgaacaacaaaaaacacaagctggttaaaaaatgggcaaagaacgtgaacagacatttctccaaagataattcaaacagccaacaaacacatgaaaaaaatgctcaacagcattagttactaggaaaatgcaaatcaaaaccacaatgagatatcacttcacacccattaggatggctattattaaaaaacagtcagaaaataacaagtgttggtgaggatgtaaagaaactggaacccttgtgcactgttggtgggaatgtagttgttgtagttgctatggaaaaaagtacggcagtttctcaaaaaattaaaaatagaagtactacatgacccagtcattccatttctgggtagatgaataaataaacaaaaggtgggatattcataccatggaatataattcagccttaaaagagaagagaattctgacacaggctaccacatagatgaatcttgaattcaataagtgaaataagccagttacaaamggacaaatcctgtataattctacatatgtgaggtacctagagtagtcaaatttacagagaaaaaaaacagaatggtggttgccatgggctgggggaagtggagagggagatggggagttgtttaatgggtacagagtttcagagttgcaagatgaaaagcatcctggtgattggttgtataacaatgtgaatgtatttgacactattgaactgtacacttaaaaatggttaaggtgctaaattttaagttatatgtgttttgccacaattaaacattatttaaaaatttgaagaagtaaaatgtgtccatataaaaaatgacaaagtataagggaagtaagcaaaatcatcctccatcaccccaatggagataaccactattaagctatgatcacaccactgccctccagcaatggactgatggaaggagaccctgactgtaaaaagagaggtggsggggaaacaccactgttgagggtctttttatgtagccaaagtggagtgcttttataaaacactgattcaacagtttaaagcgaaaatttagtcttggttgagaaggtagtcctatcacagaaggtgagaatgatgccacttttggcttccaggcagactggaataacttcagtatttttctctaagtcttctaacttggatttggtgaacactgtctttgtaaaacaaatgcagagatctcagtcataggccagtgtttgcccaagtaaattggttttagattcaggacggcaaaaattcatgcctggagtatttcttcctttcattcccatactcatccattgagtaagtatttgttgaatatctacgtgcgccgacactgcgctaggggctcaggagacagcagtgaatgggagaggacacttaccttctagctggaaagcaaacagcagacaggtaaacaaactaacacagaaattgcaaactgagaagtggtttgaaggaaagaaacgccgtcatgccattgaaaggaatgggaaaggagaagagctgaaacctgcgggatgcgaataaactcccactaaaaacaccagagatgcaaaagaccattagatcattcaggtgcacaaagtgaatacaggcaatagaggtcagaagagtggttacctccggggagggcaccgactgggggaggcacgagggagctttcaggtgtgctgaacatgtcctatatcttgatctgggtgaatagactgtataagtacaatattagggcccagcattgggggtggctcacacctgtaatcccagcactttgagaggccgaagtgggcggatcacttgaggtcaggagttgaagatcagtctggccaacatggtgaaaccccatctctactataaatacaaaaattagccagacatggtggcaggcgcctgcagtcccagctactccggaggctgaggtgggagaatcccttgaacccgggaggcggaggttgcagtgaaccgagattgcaccactgcactccagcctgggagacagagtgagacgccatctcaaacaaaccaacaaaaattatgtgaaaagtcattgagttgcatgctttaggcatgtgcactttactatatatatacatgttataccttaataaaaataaaatacccgcctcctcaaaaggaaaaggaagcgggaagcattccagatggaagaaataataaacaccaaggcctgcaggtggggccgcaggaagacaggtggagtgcagggaaggggtagtgagatgaggctggtgcacagcagaccaacaatggagatccctggggagagaattgggactcagggatggggaccagggattttaatttttaactctgttaaaaaatttcactgataaacatgccctcatgctttatatgtcccattttattttattattttttattgagacggagtctcactctctcgcccaggctggagtgcagtagcgagatctctgctctctgcaagctcccccgcccgggttcaagcgattctcctgcctcagcctcccaagtacctgagattacaggctcccgccaccacgcccagctaatttttgtatttttagtagagatggggtttcaccatgttggccaggctggtctcaaactcctgacctcaagtgattcacccgcctcgacctcccaaagtgctgggactacaggtgtgagccaccgcctccggcctatctgtcccattttaaaaacaagtgaatgaagtcatttactttctttttcagaatggcgcgtcccacctttcctcggggcttgttgtaaggaagtgaatggctttgaaggtccttttcctgtcttgaggggggaaagatccagaggccgtgcagcctccataatttccgctgatcaatgtgccctgggaggatacatcatttcttgatcagaagaggaacaaaagggaaccctgagtggagaagttcccccccctcattcattccatcgatgttcattgagtgcttattagacacaagaccctgcctgttttgcagacaagagtccagatctctcccctcttagttcaggatgaaatcaatacctgagactccaatcctgaggcaaatgggattaggatcccaggggcatgcagaaagggaggagaaggcgatccacagggaagggagattcctggctccttcacctgwggcgttgggaagcggagaagcaacttctagaccactactttctggggatttagaaggtactggaagctctgtcttgaacctttggaaagaaccctttctcaccttcgtccacacccacgtatgctggacgcactcaaggttgggtatgcctccgtgcctccctctccgggcacctgtgggactagccggcgcggcgatggggacgcgcggctccagcggcgcccgggcagaggacagcggccacccgggcaggcatcgccgcaggcgtcccgctccgtgcgcgctgcgctcggcggctggatcttcctctccgcagccctgctggctctcggggacggaccatcgtcctgagtgtggccggctgccgcgcgcattttcccggacatttagcatccttggccctgggcctgacaacagctcacgtttcaaacacccctggagggcggtgcgcccggggtgatatcctctgggcgcctcttttgttcgtaaaagtgatttggaaacgcaaagaggagtctccgcactggcccggggaccgatgcagcggaagggtgcgagaacagcccctctctgcaccccagctcccacccaagcaagggggccgctcagtccgacagtccctgcggcttccgggggcgcccgaaggcccaggggtctggggcggacttcgaattgctgacccgcgcgggagcggagctgaggtgctcgcgggagcggcttaggggatggggtcagagtggggtcccggggaagcagagcccacccggtcgcacggcttggccgaggggtcgggaacaggaaagccagcgaggtcccggagggagccacttcgaggatctgaacgcgaacccgcccagagccccggcccgcgccgccgtcctccgcagtcccggcgcaaacaacacagcgcggcccccaggcccaggggaggttccgtgtgacggtcgcgtcccagggcagcacggagggcacgaccccaacacatatttgttgaacaaataattttcaaaatatatatttggggaggagggcgtgggcgggcgaaactggccacagcactggctgtccgcggccagaattggaaagggccaggtggctgggcttttcttcgtagtccctgtgtcgtttccattccttcattcatccaaaaaatgacagatttctagggaagccaaactcctcgttcgattgtattctggaatccgggttaagaattgccaaattgtcaaaataggtttaaggagtggcctcattcccaatcatygcagttacaygactggttctgtatagccaggttctggagacaaaactgtattttaatgccattggttttctttgtaattctatgtatatgacttggtgcacttaaaaacatcattctgcgtaggaggtctgcagcttcccctggacactaaagggtgcaggggccatgggcagtggctgtggcctataatcccaatgttttgggaggccgaggtgggaggatcacttgagcccaggagtcagagaccagcctgggcaacatagcaagactacatctctacatgaaaaaataaaataacattagccaggcttgatggtgtgtacctgtagtcccagctacttgggaggctgaggtagaaggacttgcttgagcctgtgaggtccaggctgtagtgaactgtgatcatgccactgcactccagagcctgggtgacagattgagacctcgttcctaaataaataaatgcatactgcatacatacatacatacctctatctcttaaaaaaaaaaaaaaaaaaaaaaaaaaaggccgggcgcggtggctcacgcctgtaatcccaacactttgggaggccgaggtgggcggatcacgaggtcaggagatcaagaccatcctggctaacacagtgaaatcccgcctctactaaaaatacaaaaaattagccgggcgtagtggcgggcgcctgtagtcccagctatttgggaggctgaggcaggagaatggcgtgaacccgggaggcggagcttgcagtgagccgagatcgcgctactgcactccagcctgggtgacagagccagactccgtctaaaaaacaacaacaacaacaacaacaacaaaatcaggcttggtagcatgtgcctgtagaaagaattgcctgagccaaggagttgaaagctgcagtgatggtgccactgcactccagccaggtcaacaaagtgagaccctgtctcaaaaacaacaacgacaggccaggcacgggggctcatgcctgttatcctagcactttgggaggccaaggcgggcagatcacctgaggtcaggagttcaagaccagcctggccaacatggtgaaaccctatctctactaaaaatgcaaaaattagccgtgcatggtggcaggtgcctgtaatcccaggtactcgggaggccgaggcaggagaatcgcttggacccaggaggtggaggttgcagtgagcggagatcgtgccactgcattccagcctgagcgacagaatgagactccgtctcaggaaaaaaaaaaaaaaaaaaggtacaggacataaagtgggcaaagaccccagattcctcacatgaaatggattacctaggggtgaactacatttgaggagcaggactagaaagcaaaatatccatgttcccaatggtacagctgaaggaacaggcatgcacctgtgcacctgcccctggtaatggcctgtcctggtggcttgtcacatgtccctccccatcatccattttgctttgcagacaaaagcagcagggacattttgcccaaaagaaaattctttttatgagaattccttgctagcctggaacaggaggtcctgcgttaggactagcactattcaacagaactttctgctatgaggaaaatgttctctcttgctggtgtcaaatgcagtagccattagccacaagtggccactgagtgcttaaaatatggctagtgcaactaaggagctaaatcttaaattttatttcaatatttaaaaattttggctgggcacagtggctcacacttgtaatcccagcactttyagaggccaaggcaggagcattactggagcccaggagttcaagaccagccaaggcaacatagtagaaccctgtctctacaaaaaagatacgaaaaatttagctgggtgtggtggtacacacctgtagtcctagctacttgggaggccaaggcaggaggatcacttgagcccaggacttcaaggctgaagcaagctctgattgtgccgctgcactccagccagggtgacagagcaaaacccttctctctaaaaaataaagaggccaggtgcagtggcttaagccggtaatcccagcactttgggaggccaaggtgggtggatcacctgaggtcaggagttcgagaccagcctggccaacatggtgaaacctcatctctactaaaaatataaaattggcagggtgtggaggtgcatgtctgtaatgccaggtactcaggaggctgaggcaggagaatcacttgaacctggaaggcagaggttgcactgagttgagatcatgccactgcactccagcctgtgcaacagagtaagactctatctccggggggagcggggagacatatatatatatatatatatatatatatatatatatatatatatatatatatatatgttttgacatatgtacctgtgaaaccattaccacaatcaagatagtgactatacctatcacatccaaaagttttcttgtgtccccttgtggtttccccattcatgcccctacctctacacccaggcaaccactgatctgcttcctgtcatttccatttcccagaattttatccaaatggaataatgcagtctggtgctcatattttgtctggcttctttcacttggcacagttattttgagattcaccatgttgtgtctcagcaattcattccctttattgctgagtaatattccattgtttggtgagaccattctttcacctgctgatggagatttgagttgtttctacttgtagcctaatacaaataaagctgttatggacattcttacacaaatctttgcatagacatatgctgttgtttcgtttgggtaaattcctaaaagtagagtggctggattatagtaggcgtatgtttaacttaagaactgccaaacttttccaaagtggttgtaccattttacactccagtctgaagtttatgagagttccagttgctccacatgttggtcaacacctagtgtggtctttttatttcaaccactctataataggtgtgcagaggtatttcactgtggttttaatttgcatttccctgaagaccaacaatgttgagcatcttttcatgggcttcttccttggtgaagcacttagatcttttgcccattttaaaaattgtgttttcttattatggagttttgaggttctagatacaaatcctttatcaaatgtatgatatgcaaacattttctcccagtctatggcttgtcttttcatcttctgaacaatgttgttcaaagagcggagttttaattctgaggaagtccaatctattaatatgtactcttacggattttactttcacctaagaaatcttcgcctaactcaaggtcacagaggttttttcccgttttcttctataacgtttatagtttttgcttttacatttagatctatgagccattttgaattaagttttctatatgcagcaagacatggattgatccttggttttctccacaaccctattattaccactttgcagataagaattaagtcatgtaattattggccccaaagcagaagagtcaggaagtaaatccaggtttttaggcctctgaagtttgtgcttttttttttttgaaatggactctcactctgtctcccagactggagtgcagtggcacgatcttggctcactgcaacctctgcctcccaggttcaagcaattctcctgcctcagcctcccaagtagctaggattgcaggcacgtgccatcatgcccagctaatttttgtatttttagtggagatgggctttcaccatgttggccaggctggtctcgaactcctgacctcaggtgatcctccgtcttgccctcccaaagcattgggattacaggcatgagccatctcgcccagcggaagtttgtgcttttaacctaatggttttttaatgtaatgtgcatctgaatggcccgccccaggcattctgtgcagtggggctaggctgtgccctggaggctgcatttcacaggcttcctggttggtggtccttggactgcactgggagaaacactgtgacagctgtgctccaccacttcgcactggactttaagggcctttccaaacgttttcaatcaagaagtgctaccattctttgccagaataaacacacctccactttcaattaggtggagagtctgatttaaaaggaaactgagattgcgaaccagctgggcacaatgatttattttcactggggacagagaaactccagaacaggtcacttcctccttggccatcgtttttcaacatagccagaaacaggcatattttaacatcaaactccccagaagatactcggctattctgaagtatcagagcattgcgttatcaggaggcggggagggtgggagaagcgttctggagacccacaggaaaagccctccgtgggctgaacttcccttccacggccgtgtcgtgacttcccaccctgcaggaagcagacaggattgggactgctgtctactgttccaccgaggccttaccaaggtctgtgtgtgctttctagaaagaaggcacatttgcacggggagacaggggagggggaggcaacacctgcaaaccctgcttgaagcctctaagtttagaaacctgggaacttgcttctccaatgtgcacatctctataaatasactagggaggagctcagtcccgtgtgtcccaaataaggtcaggcaatgtgatgaggggacatcctttaggtcacaatttctgtactctgggtagggcaggtaataaaaagggtcagcamgggcccagcccctgaatagtggctggttgtccctataggggaaggacttgaaagcccccagtgtccacgccttctgctgatggagctgtgccagctctgggttgaggacttcccaccttcggcccgttgctgaatgtacaaggaggcagcactggagactgcccagcaatgcatctaacaagaataaagacagagagaaacctctgactgttctctgtcccttagcgtccttaaattttagtttcactgcaataaaaagaacaaagcattaagacaatgaaaagacaatccacaaactgggagaaaatactatatttccaaatcactcatctaataaaggactagcatccaaagtatacaaagaattcttaacactcaacaataagaaaatgacccaataagatctggacagctcaccgaagatggcaaataagcatatgaaaagatgaaaagacgttccacatcataggtcattagaattgccaattaagacaacaatgttaattgttgtaagacaacacctatcagaaaggttaaaatgcaaaatactgacacctccaaatgctagtgaggatgtggagcaacaggaactctcattcattgctggtgggaatgcaaaaatggtagacactttggaaagacaagtttggtcgtttcttaacaaaactaaacactctcaccacatgatccagcaatcacattccttggtgtttacccaaatgagctgaaaacttatgtccacgtgtatgtttacagcagctttagtcataattgctagaatgtcaaagcaaccaggatgtccttcaataggtgaatggataaggtgtgggaatccatataacattctattactcagcaagaccagaaacgagcgatccaaccccaaaaaggcatggaggacctgaaatgcgtcctgccgagcagtagcagacaacctgaaaacgctccagactgcaggatcccaactacatgacattctggaaaaggcaaaactaggcagacaataaaaagataagtgggccggatgcggtggctcacgtctgtaatcccagcactttgggaggccgaggcgggtggatcatctgaggtcaggagttaaagaccagcctgaccaagagatggtgaaactctgtctctactaaaaatacaaaaattagccaggcatggtggcgggcgcctgtaatcccagctactcgggaggctgaggcaggagaatcacttgaacctgggtggcagaggttgcagtgagctgagatcacaccactgcactccagtctgagtgacagtgagattccgtctcaaaaaaaaaaaaaaaaaaatggttgccagggattcaggggagggaggatgaacaggaggagcacagaggacattggggcagtgaaactatcctgcacaaccctgtaacggcagatgcatgtcctcacacctttgtcaaaacccacagaacggaacaagagtgaatcctaatataactatagactttggttagcaacaaagtatcaatgttggctcatccctcgtattaataaaaaataagatacagaatgattgtataggacgattacgagtatgtaaaataaaaacagctaacaggaaagaacaaggcacagtctaacccaagaagggaggcatttctaactttgataagccctaaaataggaaggcaggtttcgaataagtaaacattttaagagaaaacagaagactgtgttagcgctccctgtatgccagacaccacgtttagatgatctaacccttgcacacacctgtggggtggacactactgtgatttttatttacaggtaaaagaactgaggctcagaggggaaggacattgctctgtggccccagcatgtaaatagtcgtcttcggattcaaactgagtctacgccaataacctctatacttctgttcagaaatttagcaactagacagaggttaactagagtggaattgtaatattacttatctgttatttaatagatccttgtgaaatgcttggaggtcacttgtcttagcagtttgctttttaagacagggtctcgctgtggctgtggaatgctgtggtgtgatcatagctcacagaagcctcgaactcctgggctcaagcaatcctcccgcctcagcctcctgaatagttgggaccacaggcatgcaccacacctggcttttattttttggtagagaagggggtcttgtgatgtcgcctgggctggtcttgaactcctggcctcaagccatccccccagctcagccgcccagtgattataggcataagccttgtcctaacggtttaaacatttccccagaaatcatgtttctatgtttagcaaactgtcctccctcccttcacccctaccattagtaaaaggcacatttcagccactcaccttttcgtatttgcacaatctaaattaagtccaaacggagttttctggtaagcctttgctgctgatgtgtaacttcagcttgctgcctgatgcacacacactgtctaggtagaaaaaccactttcctgacccgcccagggaactcttttcagtctctggtttgattgatgtaagttaccagagattagtgacttgcggacaagatttgggactcctggggcaagtcccttccccacttagtctgggaacagtgacatagaagctggcaccaaaacaagagcttggaaaaagtgaaggcccaagaagcctggaggcagcaggacccttgggatgggcccagtgtggctgcagggaacaggcatgcagggcgcagacttgcaaccctgggagctggaggcagcacccctaacaaggcattcaacttgtagcagagataggaatgggtttgcagggagagtgataggagaagtgaaagcccaaaaggggtaattgaattagcaagggcagtgaactcaacacaaaatctttgtatggaacccgcacatctccatcccaaatcaacctaacccttctcttgcctcggcttcctacatcattagaaagaaatgatttctaagctgtgttgtgtgattggccacacctcaaatccatggtttcaatctcagtggaccctcagggatgctgggagttttactcagtgcccctcggctccctgatccaagcagcagttccagacgttggtccctctcctcagtgcctgcctcccccatgtcaccgggataaaggacaccatcaggccaccctccgcctgccccaagtacaacgggcaactccaccttcacagctcccatctgcctaggcgtcttcctccagccctgccctcatcccctcccctgctgcccccatcccccagcacccgtcttcttagcttcagtgaccccgaggaataattccttatctctactgcacgtgaccacaacagccatttcattcttgaaatcttttattgatttttgttgttgtcttcagggcacattctcttgatcttctccagtgtctcttaattctcactctcaaccttctttgatggctgttttctctggaaacttccactctgtaggaatgtgtttggggaaagagagagtcaaggagtctgtcttttcactgaaggccattaggtgactgttgcaaggagaaccacggtcttccagatgccctcaggtaccactaatgcagcccgtgtacaggaagattttcctctgggacccacttctcctggctccctcccgcggtgaagcaggtgcctgcagcccctgcctgcccctgcctgtctctggaccaccccgcctcccagctcctgcagcaggacctggagtctttcattcccccacccagcgcactctccattagctactcttcccagaagcaccttgggcgatgctgtttcctttgccatctctcacctcttcactaaggaaaagctcacttcttccttcttggctcaactaaaacacgccctttgaaagtccttccctcattcccctccccattctttctgatctttggtgctaggatgcccctcgctaggctgagctcccagccaaggtttgctgaatgactgtgcataagaaccagcaacttcctaaccgctcagtgccgcgcactgcctgggctcactgcacccacttagcgtctgtgccttcttaagcgccagaaactactgactgtgccaagaaagcagagcccgaaaaggagggcacgagtccctcctcccagaaaatcaggaccttcaagataatgcgaagtgcatctttcttcagatgaggctgattatggcaagcttttcctgtaagggacagacggtaaatattttaggcttcgagggccatagcgtctccatcccagttattccactttgctgggataagacaaagcacccacagacaacacatagagaagcaagacgaccgtgtgctaatgcactttatttgtagacactgaagtttgaatttcatgtatttttcacgtgtcactaaacattctttttcctttttcaaccatttaaagatgtaaaaaccattcttagcttgtcggtggtgggttgatgccccttggtttatgctgccaacccaagagctacgcctaattcatatccttcagcactaagtcatacagctttattttttttgactaaaaggcccctgaaaatgaaaactttacacatgcaagcagagaggagtccgagactttctgacggggcaggaggggcagaaactgctccctaaggccagggacagccagacccgtgctgatgctgccccctagtgactggccagcctaacgtccatctcccacccacggccacgctgtgacgggttgggggtgtgttccccaacacacgaaataagaacttcaaatcagttcaatcagaaagcgtaaagaactgtaaacccaataaatcatttaaagtgaaaaagtaggcttcaattcacagaattttagaactgaaaggaacttttgagatgactcagttccatttttacaccaatttaccaacgattcacgtagctttcaggtaaaaaaaaaaaaaaaaggcaagttccagaaagggctggtggcccatgagtgttcgcagaagagcctgcccgggagtcccgcctgctgaatgccagtgcagggctgcctacacctcacaccgacatacccacgaaagacagaggtggcgtggggcagcaaccttgttgtcacactgcctgggctcaccgtcacccaatcattctgtgcccttggatatcgacttcttagcctttgtgcctcaatttccctaactgtaaaacagggcagagttcctccctcacagggctgtgggactgaaatgagctgatgctgtctggcccatactgggcattcaagtgtcccctgcatgacaaacttcttgagagtccactatgtgtcagacattgagtgctttatgtctgtgtgccaggtttaatcgtgcaactactctacaacgcgagtgtcatcatccccactatgtaaatcagaccgagaaaggtcacatggactgtggtgggtgccttctcttgtacaactgattttgtgaaggcgtggaaggcacaattaagttaccatgtaacaaatatgacgtgactccaataggctagcaggaataagcactcagtaactgccaggcagcctggtggcattcttcaccttcagcagggcttgttgttgggggtgactgttcttgtttctgcatgaaggttactttgtcaccatccatctttgcctttggagtgtcttgggggcagcaggggtacctgggacaatctatatgtgactgtcagagctttaaaaacatcagcagtcacctctcctttctccttgccccactgcttcagtagatttaatggaatactccgtgcgcaaaacttgtgtgaagcacaactcagcgtgcgagtggagatatctgtacacatttaaaatctgcattgatgccacttgaatttatctgacaggtaaatgcttttgaaagcctagttctaaaagtcctggatatttctctggaaacatttcaccctcccgcgtcctcaaatccttcgagagccacaaggaagaggcctcgctatgggataggatgtggcgtgtgttccaggcgtgcccacaacctggtccagccctcctcagtccagaggccacacggccattccacctgtgggttcctatcaccttacacagttccataaagccactgccctgggctctgccagaagcactggtgggggcaggaagtggtgccaggaagtgagcaccaacttcaagcagaggcctgagcatcaccatgggcctgtctgcagcacttcgtctcactgaacccaaaatttctctcctagaaaacgaggggaaacattcccaccccacttcacagctgtgatgaccaaatgcacgcaggaaaagcacagaggaaacctttaaagtgttcacacacacatttcaacggctgaatgaggggtttgctcaagctgcttttatggccagctgcctgcactctttaaggttttgggcacaggcttccaaccccaaatgttccctctcttacgtttaatgttctctaaattaggtcagtaggaaataacatctgcttgctcgcactgtcctcgtcccccaccaggtggcattgcgttccaatgagcaatctcttctggtgagaggctggtggaggcctttttcacagcggctcaaattggaactgcaagaggaaaaagaaaaacaatgaagaaccacccaaccccccacctcaccacaactcccaccgccaaatttcagagagcaaaaccggatcatgggattgagagcttctggtgaccaaggcccgcattctctgcaggcggaggtgactgcgtgaagggtctccggtccccacacgtgtgatgtgcccccattacagaacagacaagaggaagccccaaaccacccccaattccaaagcttccacaattgataaacatttgcatacacacacagaactcaggtgatgtgtacccatgttccaattcagggggcttacatttttcaacagaggacagcgtttaggaattagggaaattttgcatggacaagcacaacagctgtatctgtaagcagcggtaacatcaaatatgatgttattctgaccctaggaatccaacctgagcaagccaatacgttaatgagcatccagggaaagacaaggttgtccgccctggcctgtcctctctctgcacagggtcatctgaaggggcgagggcactccagttaaaacattccctccaccccgagctgacacctgcctctcagccctgggaccccagagcccctcatcctttaacagctggtctcctcccctaaagagaagaagatgtagagatgtcgtgactacgtttccaggcagggaccccatttcttcatatctcacacctcgaaactcactgctctggaaatcaatgagccctccctcttggtggggtggggttgggtggaggggggggtcagtatttttttattcttttaagattatgggagtgtcatggggtggaactattgtcacagcttgcctccatatggtttcactgccttaaccttagaatgcttttgcaatcagtatggagaagtgaaaaagatgtcttccaagctcaaatggatggtgctgttaagtactaggtgctgttaagaaaacaggtattttacaccgtgctttctcatctctttggaaccttttcagaaaaatttgattcttagtgcttacataaaaaattaaatgtagatttgccttgccataaacttttactttggtactgaataatcatgaccgttatgactcggcatgtctgtacagtccatacataccattaactggcaagctttccaactaggtttaatctgcgagggtaaggaatagcttctatatcgttcatcagtgcatagagcaaaattaactaatcttagtctaatgaagagctatgtttgctaggttcctcaccatccaaagaatcactgccatcactcctacccaaacctgttctcgtccacatcttcccttttattaaaaaaaaaagacacggtctcactctgtcacctaggctggagtgcagtggcatgatctgggctcactgaagcctctgcctgctgggctcaagcgatcttcctgcctcagcctcctgagtagctgggactacaggcatagaccaccaggaccagctaatttttgtattttttgtagagatggggtttcgtcatgttgcccaggctggtcttgaattcttgggctcaagtgatctgcccaaggccttggcctcccaaagtgttgggattacaggtgtgagccactgtgcctggccctgtctcttaaaatagtattacaatctccctgttcatcaaaattgaattcaactagaatttgagtggcttctcagtgctatttcattatgttggacctttcccatagattatttaaccttcagagccattatttatttatttgagatgaagtctcactgtcacccaggctgtagtgcagtggtgtgactgcaactcactgcaacctccgcctcccaggttcaagcggttctcctacctcagcctcctgagtagctgggattacaggcacacaccaccatgcccggctaagtttttgtgtttttggtagattcggggtttcaccatgttggtcacgctggtctcaaacttctgacctcaagtaatccacccgccttggcctcccaaagtgttgtgattacaggagtgagccactgtgcccggccactgaaccataatttaaaagagcaattctcattttacatctagggaaaataaagttcagagcatcaaggttccttctacctgtctcttccatccctttctaaatggaccttcccacggccaacaccttagtctcggccctcctggccatgcctaacccgtctttcaacctccaggctctctttccttaaccacctgaggatttcctcaaataccactgtcaatgtgttttccctctattcaaaacttggaaacttcccatttttcattcaaccaactccaaattctccagtctgatcccattttatctactgtacccacaaatcttgaaactcttttataattttccctttactatggctgtatctccttcccccacgtccccaaccacacactgctgtttttgttcctgcccagcctgcgtccccttccccaaggtgactctccactctggggctctttctagatgcaaagacctaggctgcacatgcattcccccacctggccttccacagcactgtgacaccatctcgggaggggtccacctggccttccacagcactgtgacaccatctcgggaggggtccacctcgccttccacagcgctgtgacaccatctcgggaggggtccacctggccttccacagcgctgtgacaccatctcgggaggggtccacctggccttccacagcgctgtgacaccatctcgggaggggtccacctcgccttccacagcactgtgacaccatctcgggaggggtccacctggccttccacagcgctgtgacaccatctcgggaggggtccacctggccttccacagcgctgtgacaccatctcgggaggggtccacctggccttccacagcgctgtgacaccatctcgggaggggtccacctcgccttccacagcactgtgacaccatctcaggaggggtccacctcgccttccacagcactgtgacaccatctcgggaggggtccacctcgccttccacagcactgtgacaccgtctcgggaggggtccacctggccttccacagcgctgtgacaccatctcgggaggggtccacctggccttccacagcgctgtgacaccgtctcgggaggggtccacctggccttccacagcactgtgacaccgtctcgggaggggtccacctggccttccacagcgctgtgacaccgtctcgggaggggtccacctggccttccacagcgctgtgacaccatctcgggaggggtccacctggccttccacagcgctgtgacaccgtctcgggaggggtccacctggccttccacagcactgtgacaccgtctcgggaggggtccacctggccttccacagcgctgtgacaccgtctcgggaggggtccacctcgccttccacagcactgtgacaccatctcgggaggggtccacctcgccttccacagcactgtgacaccatctcgggaggggtccacctcgccttccacagcactgtgacaccgtctcgggaggggtccacctggccttccacagcgctgtgacaccatctcgggaggggtccacctggccttccacagcgctgtgacaccgtctcgggaggggtccacctggccttccacagcactgtgacaccgtctcgggaggggtccacctggccttccacagcgctgtgacaccatctcgggaggggtccacctggccttccacagcgctgtgacaccgtctcgggaggggtccacctggccttccacagcactgtgacaccgtctcgggaggggtccacctggccttccacagcgctgtgacaccgtctcgggaggggtccacctggccttccacagcactgtgacaccgtctcgggaggggtccacctggccttccacagcactgtgacaccatctcgggaggggggtctagatacccattcaggattctctactacattgctggtgtgagtgtaaatcacttggaaaacaatactgcaaatcttggcaaactgaatacttgcatgtcctacaacccagccgctgcactcccagcttgccgccctagaggactcgtgtacacacgaaccagggacaacaatgttcccagcagacttgtttgtaacagaaaaaaaattaaaaccacccagatgtccattgacagaatggagaaattatctatattcttccccacaatgagactatcataaggtagggaaaatgaataaatataagaacacaacatcaagaccataaaatcagatgaacagagccaggcacagaaagctaggcacaaaaggatacccttataaagctcaagaaaaacaaaaagaaacggtatatttaggagcagtgtgtggggaaataaacaagtaaaagagtaacagaaggccgggcgcagtggctaacgcctgtaatctcagcactttgggaggccaaggcgggtggatcacctgaggtcaggagttcgagaccagcctggccaacacagtgaaaccccttctctactaaaagtaccaaaaaaaaaaaattggctgggcgtggtggtagacgcctgtaatcccagctacttgagaggctgaggcaggagaatcacttgaacccgggaggtggaggttccagtgagtcgagattgcaccattgcactccagcctgggcagcaagagctaaagcatgtctcacaaaaaaaaaagaaaagactaacacaatctaaagcagtggttaccttagtgtagtgggggaaggggagggagggatagctaaggatatgggacatgctagttaatgtgaatctgggttcatgatttacacgttacctataggtgcattatttgttggctgaaaacgaaagttggtgccctgtaaacaatcagggaatttataatcatttcaaactcactgcccacccaaccggatccagagggcacagtcattagatggctcctgacaaagagccaaggcccaggacggtgctggccaccaggactgcgtcaagggcggcgtggagcaacacacacaggcccccaaccgtctcttataaattaccaaccgtttaaaaactttgagcctggattacagccaagataagcaatgaaataaaaaatagtacacattatactgagagaggggcctggctaataaaatcacactaacaaagttgataaagtaatgagtcctttacacttttagtggctaaaggcctaaactggaaatacgagctcaaggttgacaaggactctgcctcattgctaccatagtgtttggcacgcagccgagtactcaaaactcacggagtgcagtccccctttctctagtggtcacgcagattacctctatataaagttacttgggaggccgggcatggaggctcatgcctgtaatcccaccactttgggaggcagaggcaggcagatcacttgatgtcaggagttcaagaccagcctggccaacatggtgaaaccccgtttctactaaaaatacaaaaattagctgggtgtcatggtacatacctgtaatcccagctactcaggaggcggaggcaggagaatcgcttgaatccagggaggcagaggttgcagggagctgagatcccgccactgcactccaacctgggcgacagagcaagaccccgtctcaaaaacaaaaaggttatttgggggaagaactgaggagcatccagatggtaaataactttgggattcactgcccaccctgcagggaaatggattgatccttaaccccaaaataattacatacctaaataaaactttaaaaaaatcgccatgtatgatgtcctatctccacttttacaaaatttacaatgaggcacaattcttaagctgtttttcatttttttattgctgttaattcaaggaaaaaaggttgcataaaatccaatctgttctagaaatataagtggcctttccagtacataacatttcaaatatcaaagtatatggtaaacatacaaataaggagaaggtaacatacctcctatgtacagtacagtattttaaatcataaaataagctccataaagtacaactggcaagtgattcacaacgcggcccataagtggcttatcaaaactctcacttgaacaactcaactgcagcttaacaattaatttaataatgtggtccaaaaatacccagatcaaataaaatatatttaatcaaaataatttcctttacttgaactttctttctaaattaaagctttcatctaccccttcacacccaccccttccccataactcccacccctgaaagaaagtttcaaaatgtacattggtgctataaatataaatgctacttatgaagcatgaaattaagcttcttttttcttcaagttttttctcttgtctagcaatctgttaggcttctgaaccaagaccaaatgtttacgttcctctgctgcataccaacgttactccaaacaataaaaatctatcatttctgctctgtgctgaggaatggaaaatgaaacccccaccccctgacccctaggactatacagtggaaactgttcattgctgatgaatgcagcagtcaccaaaaaatacacccaatcttccagataacctcagtgcactttaggaaatcaaaaattacctggaagcaatttagtacatagattggctttttaaaaaaacttttttttttttttaaaaacagcagcattaaacttagtgacatgacaccgacatgattaataccatcttaacacactcagaattccgcctttcacattataatcaagcatagtggtaaactgttataaaagtgactttgctatgagagacaggttagggaacaaacaacctgacttatggtagaaacccatagctctgttcagattgcaataaaccatacacattttaaacacaacgtaacactgtaacagctggtacagggaaagaagaaatcttcactcaagtagtgtctctttgagcacaacacggtggtagacaagtaaaattggctgtagactttcattacaaacacaagcacacagagagcgacattcacaccagtgtgttcactttgtgtctctctgaagcaacaggctaaaaaaggatgatggaagtaaaaagttggtttcagaaaaagctttttgtccatttcgtacgtcatattttttcagtttcatatggtttgacttcttcctctctcttccacttattttcatttctatttggacaacaagcactgcatatatgtatttacgtgacgctgtttattacatatatacacactattttgggagtttgattcctcccataagatcagggtgaaacattctgcccttggtttatatgcagagcagtttacaaaagtggggtgaatgcactgctggctgctcctgctgcgggccggagacagagtgaggctggctggggaggaagtgtcgtttagggtgaaagtgagaaaagctgggaagaagcaaaatttcttttttttttcaaaaccatatgactgtcaccagtgttgtaaaaaaaaggtcaaatacacagttttaaagattcagtaaacattgcacacagcaagtattcagtgtaaaaaaaaaaaaaaaagcacgcaccaacatttaagtttgtctgaaggtttaaattacatgtatcatacatataagcctgttgttgaaccaggagaccagaggctcaaaagcattgcattctttcttgttttggacattggtacaagagaaatgaaaaatcccaactgcatagaaatctaggaaatgtatagacaaagaaacaaaatacctttcctttcctcccctccacaccccatgactccccacacttgagtgtattaagtaggcaagctttactcgtttcagtctgcagaatccaacgtatcattagaaggggggaggggaggtgcgtatctcagtctgtaagtgcctaaaatgggaaagacagaactaagtcaccgcttacaagcaaacgtcatcacaaaccactacgtacaagctatcacacgggcatgctctccacaaggcaccttcgtcagctctagtgccactccaaatggccaatccgctcactttaaaaagcaatgtaaagtttgtgctttgaattcaatctaaaagctatcaaacttgatctttctttaagaatgccaagtaaatatattcccaatttaagactttttttgtttctgggtaagatttggcaaaacgacaaaggtcaaatgcaagtgaaaataacagcctgaagttgacataaaatttggtatcttactcaaacataggtaagaccattttcttctttctggtggtagtaatattaaactttgttcaaattcctttactctcaaatcaaaatagtactgaactattttgttcctgtattaatgcaatagaatcttggacctttttttttttaacatttgctgggaaggaaaagggtagcatggggaaacaggcatgaggcagctggttatgcagatatactaaatagttactcaaaacctaatgtcagataactaaattacttcctaggttttcaatatttaaaaattttgcttactctatgaaacaggattgtagcttaaaaaaaaaaagtgctgcaagcaagagatttaacattacagaatgcaaattcccatcacactccttcaaaagggcctttagagtttattccttaattggaaactgaattcctctgaacttccttgtgctctgtgtgacctgggtctacactgtttttccagttgcattttatgatctgtcactgaaaacaatatccataaacgaaaacacaaacagatctttctgctacaacagaatcccatgatcaataaggaaaggaaggagaaatgagtgaactcaaaaacaagtcctctgggagttattgtgattaccttgttgattggcctccatggacgactgcttacagtcctgtgcatagtgtccgcttacaccacaattgtaacatgagacattcccattcttcttgggccccgaaccactggtgttggcaactacgttaggtgctggatatacaggatagaatctcccaaatcctgccatctgctgcatgccatagttggcttggctccccatgactgggtcatgtaccagtccatttgcatatggagtctgaggcagaaaaaaaggaagttggtttccattgctctgatgtgcttggttgaggtagctgccattgcaaatggatggcagagtaaagaatgaagggactcggtacattggtccaggcattggattaggataatagtaactatttagctgaaggtttccattggtcccacagctgcaccttcgcccacaagaaccacaaggacctgagcccatctgctgcggtggcactactgtcccattagcgttcgtgttccccacagcactgatgtaagaggtgctgtcactctgcgcggtactgtgtgtcaaggcagggcttgggctcggggcagggcctggggtgtgggtaggaactgcaggaggaacagttgcctgggcctggctgatacctgcgctcgctggctggggagaagttgctgctgtgctgagcacactggagttctggctgggtaacacgccggcagcaaggggagagcctggtaaggggtaggaagctggtggctgagcagctgagaggccagctgctggaagaactaccttcacattggtaggctgagggactgtccctgtgtttccctcaatttgaggcaccatttgattgagtcctaccacttgggatgcagattttgtgatggggtccgtggtagcaacaggagagcctgggaaactacctgggttatggataggaataaaggcagtgtttggtgatgcgatgctcaggcttccgggtggttgttgtgggatgttaactgtgcagctctcagaagatccctgtggtggtggcaactttagcctctgaactgtaagatgcaaagcgggagtactactgtgtggaaggaaggttgatggaataggtaaaggggaagccagtaactcaaggtgcttttccgattctccagtgcaagctgttggccctagtattccaacaggggttgaatttgcagactcccttattgcagaaatagcaacaggactaggaacaagcatccctatggttttgccatcagcgggtttgggtgcaggaacgacaacttcagacttctgggcaccattgtgcatgacacagtgtaacgttggcataaaagaaatatgctgatacttgggtgagtttaagggatcttctaaaaggtttccattctcatttcctagtgaagcaatttgaacaggtggcttgacagtgacagtctggttgacagaaccgtaacctgtaaacctagttgttgatggattcccagaatcctcagaattgctgtctgtgtctaaagaaaacaaacataaagagatattaacacgggcataactcccatctttcttgctagaaataaacattgagtatacctcaaagtaactcaagtttggaaagtgtccctctatgtttcctgactgtccaagctgacctccctttaactttcggctttctatgggtcgatattagatcaacgctttatttttaaaatacggggatataaacagaaaacaaaacataaaaggctagttggagtctgaatgaaacatagtataaaacaaagagatttatgtaacaccatctttgtactgagaagagcatcagacactcttaaccttaataaacttcaggcaatccacttggtttctattctgcactgccaacccaagttcttcaatttgtcgcagataaatgatacaatttcaaagagctcagtcaagacaatatttaactcaaatatctagaggcagggaacagaagagttttcttttgttgttgttgttgttttttttagaatggaatcaatattcttaatactaaatatttcaatggggggaagaaaatttaaagctattattaatcataaaacaaacacgctagaacacaagaaacaggaataggagagtgtggcaatttctccaaaatcaaaacagcaaaacagcaaatacaaacaacactgcatcggctactactcctgcatcagtcttacgcttgtgtacagaaatagcgtggacctagccttcaggggatgtcctgacttttggtataaaggggacaaggataaaatctgattcacaatgtttaaacatcatagacccagacactgtgttgatgtatacacagaccattccattaaaatgtagtgcctatttaaaaatctttctgcttgtatggataagctgaattgtactaggtacttaaaatatttgtattcattaaggtatgaactgtttatattcagcttcagatattaaaaagttttcaaacagaacactaaaaacgaattcgtcttcctgaagaaagattaaatgaaagctacttactgacacagaacatcaacagtattactaattcaatgattttaatttatattagaagaaactcaaagagtgaatggttctagcataaacttcccctaatagattaataattggggtatttcttgctaaactttgcaaaataaaaactatcccaaaatccaaacttattgaaggcattttatctgtatcatcacaccagtgcacagtcaaagataaaaatgttaagtctgaaagaagcagaaacattttggaagaagtgcgttaaatttctatgtgaaatagcaaatggcctcatgatttttaatgctcccagttggttttctaagcatcctgagactcctctagacatgctgagacatgtctcacccttttgtgcactgatttcggtaagtgtaaagccccaaacagaaataccatcactacccaggagagcaacagcaaagccacccacgcccttttcaaaggagacttttcatccactcagaattctaaaaatgatcaaaactctctaccataatggatattttccttgggtgaagacagccctaagccattctttcatatttaataacagcctatttgaaaaaagccaagttcctccacacaggcctccaacttgtgccatctgatggcagaagagggatgctgtcattacccaagtgtacagatgtacactaacacttcggacagggccaaatctgcagtgtgagccacagagtcacctgcttatcctagagaatcaagcataaatgtacaatgaaacatactgaaagtttgtctattctgggtaaggcataaaaatcctctcatttaatgctgggtgcagtggctcatgcttataatctcaacactttgggaggccaaggcaggaggatcacttgagcccaggagttcaagaccagcctgggcaacacagcaagaccctgtctcataaatttaaaaaaagaagacgaaaaaaatcctctcatttaagtttcaaaacagctcagtgagacgttgttttcattttttttctttcacaaggaaactgcagattagaagtacagtgttgcctcagattagaagaattggtggtagagtaactatgctacatttggtatgactacaaagtaactgcaaagtaaaagctgactttaattgtatatcatgtagcaacactctataccatagctccctaagacatagcgtgataccacaacacagaaagaagctaatgtcacagagagctgcagactgtccaggaagaaaccacacttggctgaaacaatatgtggtaaggatcttaatctgtgggtggaccatgagaagtaacttgatgctgcccaccagcatgggtacaccttgtaaccaaggtgttaccaatcagacgttgtcatcatgcataaagaatgacatcctcattcaacatacacatttttaaagagatctcacctccataccagaatggtagagtaagacctctaataatccactcttccataaaagcaatgaaaaccctagcaaaaactgtcaaataaccaactttctcaaaattctggaaattaactaaaggcttacagcactctgacgagtgtttattcaagaaaaacagctcgatctgtaagaaaagaaaatctcaaggcattttccccttgtcctacttccactccccctttctacagctctaaagtagccctgtaaatgacttgtacctcactttctgaaatcagtgcaaacaccatctctcttgcagtagtagctacaaaacccagcagccattaggagtatgggtttcgagttccccaaaagccccaccaccaaactgtcaccatttgactgtctggcagctagcactcactctgtgttacagcctcttacccgcaggacatttgtcataattagtcagaagcaactgtttaaaaatgtagccgcccaaggtggcattactagctggggctgacaagaggctgaccagaaaacttaaaatgaaaaactggggaataagatggctacaggaggctttgaaaagctttaatatattcctgggaacctaaaacgttttgctcatgcctatagttacatacctttccaaggcagacctgagaaggccctaagctctcactgctggctgattttaagcctctgtgcaacgaggaactgaagacataatacacagagaaaacaacaaaatggcagacataaaacctaccttattagtaattacattaaatgtaaatggacaaatagcagagatcggcagaatgaataaaaaaccataatctaactatatgttgtctacaagagacaaaatttatatttaaagacacaaataggtttaaagtaaaaggatagaaaacaaaatactgtgcaagcagtacctagaatgctggatcgactatactattctcagacaaaatagactttaagacaaaaattgttactagagacaaagaaggatatcccaaaatgataaaagggtcaatcaatcgagaggacgtaaagagcataaacatacatatgcatctaacaagacacattttccttctttctacactaactctacctcattatgatcctgtcttcatcctacttaacttcatatgcagtgaaatatgtttatcaaatcaacattgttaggaatttctaaggcaatgatctatacgacatcctttataacgactttacatttaaaatcagttaatggcatttataggatcataaaattccttgtttgactttgacatgaagaaacaacacacatttccctccacttccccacccctgccatgccaacaatactcccacttcaaagagcaaacctctgtctttctcttcttcactttcaaaactttctcttccatcatgtcggggactagatggagaactgtaactctctgaagatgtttctccacatgtgtcatgtccagagccaatgtccaaattcacatctaaaaataacaacactattttaaaaaatcatgttaagtcattttaaattaatttctaagttgaatcattagaaattaattttagctatattttcttcagtttccccacaaccatctaaaaaagcttgtccttgatctaaactgattaaattacaattctaatagaaaatacttaataaatatatccttaaaacaatgcacagaataagtcaatcttactgacttcaaagaaaaaacgagttaaggttggttgcagggtctgtccaataatatcactttgagctactttctaagtctagatattttaactcttaagagcttgctggaaaattcattctttaaaagaactcaagaagaaaagggctgccaaaatgcctattcaatgaaaattacttggagtatttaaaataataaaatgcttcccatctagtagactgaatagtcccctgagttctgccaagttcaagcctatactgaggtagtgtgaggtggtgacaggacctgccatgaccaactagccgtatctgttttgagcacataaggagggactatcggtgtatctagtattggacaagagatacaaactttggattttttttttcctgtagtggccctgactgagggaaatattctcttatctctgtaaacccagtagctagcgtaattctgccttacagcaagcattcaatatatgtttggtgtataaatccccaaataagggattccagaggcttcttaagaactatagattagtgaatcatttctgtgccaactggtagaaccagtaaaagataatgggtattaattgcacgggcaaaatatgtgtcagagaaaaggcacaatttgtataatgagcaatgcaggcaactgacttgtggttttggctgggataaatttgtaacagtgttaagactgttaaacatgacctagattagcccagccactcaaatgttaggtgaatattgaagaaaaataaagtcattaggaatgttgatgttgctaaattccttctgagtaataaatgtcaaactgtcaagggaaaactgcacaaaatcttatgaggctagaaggaaaagtggcagaggagttcatgggcaagtaacaattttacagaaaagttacctggaggatacctacacagcaacaggccctgaatgacccatcataaggcgactaaagggatgcaagtcaacaccaccaatggctgcttgaagacaagctaacgggccatagtggccaaataagttgtcattaaattggactaatgatgaaacctatagaacttgcatgagtcttgcatataaatatttcaaccagcatataacaaaatgaacaacccaagatcaagagaatcaaagattcaacaggatattctcaaactagaaatggactgaaaaggaacctcaggggtagcgttcatcaaaatgatgcagacagtgaaactacagtagactatagttcaaagagcaaatttcagaatatgttttaaaaaaagcagctacctctccaaatggcataatttacaaaactattttctttacactgtgcaagctggtgaatattctaatcacgaattgccatatacaaaaccgcagcttccaaagaactgaatacataaatctaaatctatactaacgtaacttttttttgataattcagaaggtacttcagaattgtgtggtaccttaagaacttttataatcagaaattatgtgatcctctagagattcaggggatgtggaaagtgaagacagaccaattatgccaaaggatactccacaaattgcccttttaaaaagacacacaaactgaatttgtcatgtctcaaatgataaagggtcttgcacataataaaaacaaaaagtaaaacataaaccactattctaacactaaaaatactggaaattggtaattataaacaatagaagtctgttagagttaagactcatttaaataaatcataggcaacagaaccacatatttcatctgggatattaaacgaagctagagaccttctaaatcttttacaagaaactgagagatcaagcatctcatttccctctaaattttttggtgccacaattggcaacagaagagtggggtggaagaaacactgggcaataaactacaatgatgagcattctttttttttttttttgagacagagtctcattctgtcgccccggctggagtacagtggtgcaatctcggctcactgtaacctccacctcccgggttcaagtgatgctcctgcctcagtctcccgagtagctgggattacaggtgtgcaccaccacatctggctaatttttatatttttagtagaaacagggtttcaccatgatggccaggctggtctcaaattcctgacctcaagtgatccaccgggccccagcctcccaaagtgctgggattacaggcgtgagccaccgcgcctggccatggtgagcattcttaacgctctatatgaggtaatatgcacctcttcagaagacagactttcagaaagcttgggttttaacagaaaagacactccaacaacacagacagctgacggcgctgactgcgtcctggcaggagccagcacagaggagggctgggagcgatctttgttttcttttgaaattctgagctacataaatggattatcactcaaaacagaagttaaaacttaaatttaataataaatttttaagaagtaaaacaatacaaatcttaagctaaaatgtattatttaaagatccaaacaacctgctaatcagaaagactcagtattttcagcttcaagacaatgtctctccaatttatgatatgagctgttgttccataaaaaaatccttaggcacgtactgagtttactgaatgcttaaagacaattcttccttggtgccttaatatttcaaagaaaaattaatacacagaggggttttttaaaagttggaattggcatacatctgcgctgcacttgatatcaataagacaagctgtacaaaaaatatttcattcagtcattttataaatgtaaatacatacaaatcggtgacggatatagaggagaaaatagataaaattgaaaaatacgctgaggttgttattttcataacacttgaaaattaaggaaaaaaatgaatgggagtttgtgatgctgttacaaagttcttaataacctatacaatgtatgtttccctctaatttattagaacaaggaaaaggaactaaattgctgcagtgaacacctaggtacttggaactaggaaaatgctcttcatgtttttacatgtaattcttacaatctgctgaagcaggcattactcctgttttacaaatgagcaaacaaaggcatcagagaggtcacatgcttaataaactgggggagcacaacactcaaaccctaactgtctctgaccaacgtccacgtgcttctcctctggaaatgggctaacatcgaaaaaacagttgcaaacttctttagtgagcagtagttcccaaacactgtgagacaagagacagagtgagcttgtggagggcaggaatttcattcagaaaatggtattttagaaaacaaacacggcagcagtatggaaaatgaactagaaagagaaggaacagagacagggagggccagcagcatcaatctccaaatgtccaccgacagacttctgtcttcctcatttagcttgttcctcctccgttaagctgccatcgccaccagagggaacctcagagatagtaagtgttacaagatccttctacagacaagatgggttttgtccatgttattttactcccacttccaatgcttcaatgagttggccagatgattttagttttttaatttattatttatttatttatttgagatggagtttcactcttgttgcccaggctggagtgcaatggcgcagtcgtggctcattgcaacctctgcctcccgggttcaagcgactctcctgccttagcctcccgagtagctgagattacaggcatgtgccaccacgcctggctaattttcgtatttttagtagagacaggttttcatcatgttggtcaggctggtctcgagctcctgacctcaggtgatccactcaccttggcctctcaaagtgctgggattacaggtgtgagtcaccgtgtctggcccagattatttcagattcaaaaggtaactattttttttcttcatcactattcagtctttctatacaaatatctagttgaaaaatatactcaaaacttttaagaaatagattctggttattcatattacatcacaactgaatgtactaatattagaataacatttaaattaacaatcacatttgtgggatcactacataaatgtgtcaggggcacccagggataaaatattctcctagaggtctgcgtgctcttattcttttttaatcgttacaattaatagtgaagataaacaaaatcaatgaagctgcagaagggcactttctcaagtcaaatgaaccttgaacctaaaaataaagggaccttaaaatagtggtgggtaaatggaagccatctagtataacaaaaatttgagggttgacattcccctaaagcctcataaaacttcgcaaaggatggttattaaatcatgaagaagtcaacagtattctaaaaaatactttacacaaaaacactctcatgagcggccggcaaagccacaggagagatctcccatggccttgggacctgtctcctgagttggaactggctggagaagaacaacctgggagactcctgctgccagaagggagaggcaggtgagaatcactgaggcaaaggcaatctccacccccatggctggtttgtattccctaaattaactccattgatttcagaactgtttaatttggaaattgctgtacatatcaacacaaggtaaacttatagtattaggatttgacacaacagctcagtatctattaatacagtaagtatcatgctgaatatatttatgtgatgggtatttgaaagaaaaataaccttcttacctttcacagtaccaccatgggcatgctgaggagtggagagtctaataccatttattctactattcaatctgttgtcagttttcttaattttctccctaaaccaaatgaacatattgccaacattttaataaggttatctaccaaacacattcagtacagtattgataaaatttccttcaagactcttcaaatttttttagtaaggaataatctaaatacaattaagattcgcccttccgtggaaagttctgagagttttacccctccaaactgaatgcaatatttgacagtagctttatttttatcacctgcatatattaatattttgaaccaaaagagtaaaacccagaattaaaaatataaagaaaactaactaaaaaaatactatgttgtatactatcataaactaaacaggcctattatcaaaggctatatgctgtctttccttaaattgaacctacttttctgtttgtggctttcctttcttcttatttattgaagataaactccgtttttcagcagaatgctagtagaaagaataaaaagacaaatcagacaaaagctaaaccattttgacgtttttactctcataataaacattaaaatgatagattcccagttgtatattctaacaagtgttgatttccaacctatttttgaagtttcccacctgaaccactaaaatttacatattctgtgacacttacatattttcctcatgattaatacagtattattttctatttttctttgaaaatggacctacattcttttttctgactataaaatgaaacacaatcaagtgactggcacttgctgtaggtttactactattctcttcaagtacaattccatataactgtcaacacttaactacgtcaactctaagaagagagggtgcaggcactggagtaggggagggaaagtaaactcagacgggctttgaaaataggtcactaattatgactaaaactatttataatttctcagaatatgctttaatgcataaaaacacattccaagaagagttaacatttggatctgagcgttggccagggacaacatcgggttaatgaatcaattttctagagagaagtttcattccatacttgtaacatatacacagggacctccccccatatctgcgaggccatacgacatgaaacatacttaacagcattctgctctctgatcacacccaaatcttaagaaagcaaacatcccctaatgcattctgaagtgtcaataaactgacccaaatattcatgaagaaaggtcagttggaaaatttctatcacaaatagcaaggcagtgattgaaatctgaattctaattctttcaagaccaaaaaattttggcataacaatctgatgtacacctttgttaaacagtgaaggtattatttttaaaatttttattttgttttaaatttattttttagagacagggtttcactctgttgcccaggcagaagtacagtggtgtgatcatggctcacagcagccttgaactcctgggctcaggtgatcctcctgcctcagcctcccgagtagctgagactacaggtgtgtaccaccacactcagctaatttttaaattttttatacagacagggtttcagtatgttgccgaggctggtcaaatgggtggcctcaagcaatcctcctgccttagcttcccaaagtgctgggattagaagcgtgacccatggcgcctgggaaggtgtcatattaaagtgtactaatcttacacaagcaataaaagtaatctaaatacacattttcaggtctcagaagagcttagatcatatataagtataaagtctaaaacttaaacattccttcatttcttaccagatatactgtctgactgaaagcttacagaacttaatttttttcttatagaggagcaatgctttaactatatagctccaaaacaaactccccacacacctggtcagccgaggtcacacagtgctctgggtgttgaatggtggtacagctttgcttcctccaatccacaattccattctgttcagaatattgcatggtaagcccatccaatggagaacaacttgtaccaatattgctaccaaagaaaagtttatgaaagtgtgaaaatctgccctcaataataacctatttcatttcaacaaagaagttacagtaaccctttcttcaatatattagtttcttcaaggaatgcctaatgataggtctaagaaaaaaaagtatactatgagaaataaaccactacacatctatttatcattaatacttgtctctaaaaagagtagtaacagctgcacactctgcttttagacactatgcgatggtgatcatcatacactgcttacagctgggacagagaggcttatacaacctgcatcttgagagcactgctgtcatgagcacttaagtaactgggcacatgaaggaacaggataatgagatcaaaaaccaaaagaaacagacaagagaaataggccccagcagaattcagatgataaacttattggacacagactttcaggtaacagtgcttaacatggttgacaaatacaatactgaggattttggaagagaaatttggaaaagaaaaaaaaagtaaattatagaacttataaaataaactaatattacaaactcaacaaatgggaaatagatggagaaaattagtgaaggggaaacagatgaagaaaatcaatgaagaaaaaattggtcggaagaaaacagattaaagcactgagactgaaaaaaatgtgaaaaacaaaaaaggcttaaaagacatgggacggctgggcacggtggctcacacctataatcccagcactttgggaggctgaggtgggtggatcacctgaggtcagcagttcgagaccatcctggccaacatagtgaaactccgtctctactaaaaatacaaaaaaaaaattagccaggcatggtggcgggtgcctgtagttccagctacttgggaggctgaggcaggagaatcgcttgaacccaggaggcagaggttgcagcgagctgagactgcgccactgcactccagcctgggtgacagagcgagactccatctcaaaaaacaaaaacaaaaacaaaaaaaaccacgggacatggtgaaaaatctaacatacaaggatttggagtcttggaagacggagcaagagaaaagcggagaagaaatatttgaagaagtaaaaagctagttttctaaaatcagaagacatcaagctacagattcaagaattcatgcaaaggaagctaggaaaactgctgaaaaccagacaacaacaaaaccttaaaagtaatcagagggaaatgcgtattatcttcaaaagagcagcagtaagaccgattgaaactctggatgccagatgacttaagtgtgagttcctctcaaaatcagagtccagcataacagagtttatttgggaagtgatcccaaaaagcaggagcaagggagtggagaggatgaaatggcgaaggactgcaatgaagagtccacagtggaggctggaagcatcaggagctccgagcttctgggccctcccagaatgacagacccaaaaaggatggaggcagactcctgtgtgagcagcaaaggccctaaggcggaacatggaaagtcacggctcatacttgaggagcacagcgctaatgtggtatgagtaagaaatcacagacggttttatgggatctgcaggagaaactggaggtgagtggagagaataagatgcaaggaaataaagggagaaccagatgataaggaaactatgctctcaaaagctcacggaaagtaactgcccaattagaagtccacatgtggcaagagtatcttgtaaaaatgaaggcaaaataaacattttttccagataaaaatttgagtgcattcatcactggccgatgtgactataggaaatactcaagtgttcttcagttggaaggaaaatgatcataggtggatgctcagagacacaggaaggaatgagtacacaaacactacaaagaggtttcatggaatttaaaattatacagagaattaaaatgcatgacagccacggcttacaagttagggggaaataaatgatgttgcagtaatctaaggtcctcaaattgtttgggaccagtacaagcacaaatatccaactttaataagtcaaagatatgtaatattatctctagggtagccactagaagaactttcattgtaaaactatcaaagatgataggggaaaacaaaacaaaacaaaacaaaaaaaaaccacagaagaaaaacaacccaaaaggaggcaaaaaaagtgagaaaaggaaacagaaaaagtgaagaaataaaaagcaaatagcaaaatgacagaattatagccaaatacatcagaaatttaattaaatgttacattgattttaaaacataccaaagcactttttgttttagaaagaggatacttacttcacaatgggacttttcccagtatgcttcttgtggattatggcatgctgcaacacatctagaagagaggaaaaagtaacttattacactaaatgctgcagcaaaaaccaacagtaggatgctactagtttgtatgatcataaccactggtgacagatggtatgaagcacttctaagcatttctcaacatagaagacatcttaagcaatttttcaaaaacacagtaaactctgaattaccttttatgttctctcaaatgtcttccacctaacagcaaatcaatcttgttcaaaactatgaaagtctatatgagcatgtccctacaaaactaaaacatccaatttcagatagaactttttaaccattaaaaaatgaagagtttcaaacattcaaacctgtatctattaatataacaaacatccatgtacaccaccctccagactgctccatatttgcctcttttaagaaacagaatatcacaggaatgactgaaggtcttccctccattccactccccctcatccctctagaggctaactagtagcttacttgttgaaacattctagtgcaagttttaactatccatatatgtgtgctcataaacacattagctgttacatgtttcaatatacaactgtccttcagtatttgcatgtaatctatgcacatcctcctgtatattttaaatcatctctagattacttataatacctagtacaatgtaaatgctatgcaaatagttgttatgctgtattgtttagagaatgacaagaaaaagaattttttcccccaaatactttcagctcacagttggttaaacccaccaatgcagagatggagagccaattgtactataaatatcctttattttaattgctacctagtacaaagacattatttatttataacattactaacatttgaaatgttcaggcaatttcctggtatttgcccttgcaaacaatgctgcctcaaggacccgggcccatgtccccttttgcaggtgtgtaacaattctcatagatgcaggattgctggacagcagcatataattatctccaacttcactacacagcaccaaatttcgtccaaaatagttctgtcaatttatatccccatcagcagtgcctgagagttcccactgcttcatatccttgatgtcagactccaaaatgttttgtcaatctgctgagtgtgagatgacacctgtttccatttgcattttcctgactaccagtgaggctgcacattatgtaatagctgttcaggtttcctcatctcagaatcacctatttatgtctttcacctatatttctgttgggatgattgtctcattgactttttaggaagatccttccatagtctggatatagtcttatctgtaaatatcttgcaaacaccatctctcaatctatggatggtctcctggctatatggttccttttgtcacagagaagctctaatttattaagatctctaccgtggtcatgctctactttattcaagaaaggcttctcctcccaaattaacattgaaaagtttaagttttacattttacatataagttgttattcacttgaatgtcttctgcatgatgtaactgggaatctaattatacctattttttcatatggaaaatcaattgtgccaacaccatttattgaacggtctattctttgtccacacaccatttattgaacaatttattctttctccacacaccatttattgaatggtctattccttctccacttatttgtaatgcaacctctgtcacattccaattcctatatgtcagtttcttcactccttaaatgttctatccatgtgctatcagcaggcagaatgatttactctagtgaatctacctttaccttcttcttgacttgaagcttcagagctgtcttcttttaagtgttctaatatcttagaagtcttcagagaggattgtaagttatctgcaggaagcattcaatactattaactttttaggaaaattaaaataaagaaaacaaatataataattgtttttttacctaaggaaaatgaatggagggtgagtggtgaagaaaacatggctactagtgagaaggcaagatgacacagcccaaagcactagactgtgagtgggaaccgtgttcaagaggccagctgttccctgaagagcgactgacctggacaagtcatttcatatctgtcagccccagtgtgctcatgtgcaaaatgaggaaataaagtagaaaggtgcttcttaaacatctgtggtgtggtaaagattcagttttcatttttttaaatcttcagtttgctgtggatcgttacttttgtaaaatacaataaaataacgtggcactgtcaaattgttaatctctcagtgtctgctctcaatttctgttctcgtgttacagaacagtaacaagcaatttatggaccagcactggcccatgcaacacattttggattacttccccattaaaatacaggccagcaggactccacagttcaacatcttaactcattcaggactttagcattattttttttcagcgctagttttcaggatatggagtgatgctctctgtaccagagaataaaaagataaagctatcaattaaaaaaaaaaaacccaacagtgtatgcaaatgaaccctgacaacagtatattcactagtgaaacaactcagatatgtaagaacgttaggctgacaagatttcccacaatctcaagttctgtactttcatacagtgttttaattttacaacctaaaaacaaaatccaccaacctctttagcactgctcatgtaatttaaatactgccacaccctcaagatgagtttattacttatatatgaactcctcacttgggtgagttttcctgagcagcctgttcatctgaactaaaagtttaactttgtgctcaattcaatgcctttttgaaactaaactgatgctattgatacatgttcaataaaaaacacatttggcgcagggggaaagcactgatggttaaatctacatagctacagaatgatcaggattctctttaataaatgctgttgttatcattcagacataaatttaatcatgaagttgtacattttgtcttggtcaactaatcacaaagagtcatatttttaattcggattgataattacgttagcattaacacacttaattagagaaactttaaaggttagcccgtgtaacaatcatactattcttgcacctctttttctcacacctcaaattgaggaaatatgtgtttttctttcccctttaaatacaggaaaaaatgactctcttgagagcagagggacagttttaaaaaagaaaaatgttccttgccatagctatgcctgaagttcagcagaaattctgctaaaggacacgccaatgttactgacaaaatatttgtaaaaggcaggctgaggtagatgtgtagaaaattaaacacaaggcagacagtggtgaaaggtgaaataagagggcaaaactcaacatacggaacataagaaaaactggcaaagcttcgtggaagaggtgatgtttcagctgggccttaaaacaggtgtgattttaatgggctatgacaaaaggatgtatgtttaagtaagggtacaaatgagcaaagacacagggcaggcaacagctgggcatgctaggagacagagcacagggagcagaaggaagctcccggaaggtcacagtgaggcctgaatttcagaccaagcaggaatttaacacatttatccttgtgataatccagggatagatcagagtgggaaactagaatctgagaaaagagtgagggtttacctttaatagtccgtgcatgaaagaaaggcctaactgtaaacaaagggatggtgacgaagggacataaaggaagacatcctttgtctagtatgggttgtcctttccgtgatgaaaacaaagaggcagagtgagaagaacagggctaacattttctgtctgatcggctggaaaggtcaattgggaacaggtgacaggaggaagacagactagatcatacaccagcacgtggcactgtaaggtctccagcctgtgagggaacagttcctgcccaggaaatgaaggactggccatgccccaaagactagagagactcaggccttaccttggaatcagtctgctctgttatattagcttttattcatgaccttctttaaaactgcagtgtaaaaactcattaaaaatgacattaaaaatgtatgtcactattccttaactttaactaaagtgacaaacctacacaaaatgacacagtaaagcaataaaatccaacaaagaaaaaagatttccacagagggacagaggatgcttactgatactgtgtagggagtctgatgatatggactgaaagaagctgtgtactttctgactttgtagaaaagcttgtgatgaacttgaaaatagctgcctgcacataaaaagaaaagagatttgttaatttcaggtaatgttaatccacaagaagctcagtttcaattataaagcagaatgaagtggcagtttaattcaggtatggaaaaatatttttcctatagaaaagaatattattttctaatgtatttcctatgggaagaagtcagtaacatttaacaaaattcatttgcaagaatcgactaaataggttcatttttaattttgtataatctaatggtaagttttcaatactggcccaaaaatgtattatttcagcctttgcccaagtggtccaatagccacccttctgttcagaaaaacaactgcaatttctttactcttctccacaggtgttcttctccttatttggctgtactttttttttttttgagactgaattttgctcttattgcccaggatggagtgcaatggcgcgatctcagctcactgcaacctccgcctcccaggttcaagctattctcctgtctcagcatcccgagtagctgggattacaggcatgtgccaccacgcctggctaattttgtatttttagtagagacggggtttcaccatgtcggtcaggctagtctcgaactcctgacctctggtgatctgcccacctcggcctctcaaagtgctgggattacaggcgtgagccactgagcctggcctttggctgtagtattaacgggcattcccacactctcaaagtgggaggttgggaagtttgggatgctaagagtcctgaaaaatatggaacagtcaattatgtagttatcatatatcatacatatattctacaacctaaggcatgactaactgatgactcatgttgaatgtgtatcatgccatgagtcaaagttatctttgaaacccagctttcctcatattttattaatgtaattaaaagactccagctggaggtcttcccgacagtggtacctgtaaaagggctcttgggcaaagaattagagcagaatctaccaggaagtttactttggatttgaataccagttcagtcgcttataagatgaagcaccctaaacaagccagttagcctttcaacttccaatttctcatggttacaagaatcaaatagtgcacacagataaacagtcaccctacctactacttaggtgctcaacatacaaatcccattctattagttttgaacacttttaatgcgcattttaaatttcaattaatttctcccccaaggtttttgacctattattcagattaattataaaatcattaatataccaacagatgacctttatgggccaaagttgccttgtatatcatgcaaaattgcttcttggtcttctaatgtgaaagtaaacattcaacaggaagacatgggtgaaattaagagatgaaagaactgagatctgaattcaggagcaaatctagatttccaggtctgaacatattacctaaggctgacattaaaatccaaaggcagtggtggaacccacacccagtcatgttagaaaccaactggtcaaaagcacaggcacaccttcaattcaaggcctgagtcccaggcaacagcccagatataactccaaatactatgtatacatccactacaggaacactgagtattacatttaaaccacaaatgagataaaggcggggactgaaatcagcatgcaaactaaagtcaaggctcattaatgaataaccacagatggcaattataccgatattaaaaaatcaaagtggccataaactatttgataaatcaaatgagtgagaaaaacaaggtcacattctgacatgacagaaatcatccaaccccaaatgcacatttcaggccgtattttcattttcctaacctacagcatatttgagactaaatgcagtgtgtcctgtaccaaccaagatctgtatcactaataagtacttcctatttctcagtttcctttcttccgcctcctttataactgctacacttctgagacacaaatgatgacctactaatttaaaacccacaaactgagaaggaagtgtcctgacatcctattaatggtgttgaggccacaggccagccatttgggaaaatatacgaattcccgccatactccctacatcaaaataaattacaaatgaatccaagatttttttaaaaaggaagtatcagaagaaaacatattttttgaaacatatttcagatacattttcaaacatatctttgaaaaggtctttctaggcatgacacaaaaccctgaaaccagaagagaaaagatcaataaatctgagtatataaaaatttaaaacacctctatggtcatgaagtaatcgcaagcagggctctttatctaacaagtaactcttccaatcagtgacaccaataaagtgtggaaaggactgaaaaggccattcacagggaggcggcaaagcctactcaaacacaaactgaaatcggactgtctttccgagatgggcaaagaagagcaattgagaatgttttgagtctgctcaggtgggagatacaagtatgaggcctcagaagacataaagtgctgctacctttttagaaatagtttgaaaatattacatattaaaaatacatgtaacttttgaccaattacattatttccataaattgatcttacagataaatgtatccatatgtgttaagaatatatacctggagaggattgcttgagcctaggagtttgagataagcctgggcaacagagcgaggtcctgtctcaaaaaaaaaattaataaaaataaaaagtaaaaaattaaataatcatatacctggacattgtagtagtttaaaaacatttagaaacaactaaaatggacgtaaaatatgttgattaattatggttcagctaaaaaggtatattatgtagcaaataaagtagccatctttttacatgtactgatgtgttaccatgtcccaatatatttaaagaaaaaagtggcagaaaagtattaatatgtataaaatacttccatttggatagtaaaggaaatacacacacacacacacacacacacacacacacacacacacacacacataaatctaagggcatgtatgtgcacagaaaattttggaaaagttaggctactttagctgtcagatttggagaatgggaaaccggggaattttctcagtacacacctctgcattcttcaaaattagctttaataacatctttacagtaaaaacacctaaaatacacacagacacagacatgcacaagaggccaagtatgatcaaagctgaggagaatcctaaaagctttaacaaggagtcacccacatacttttttttttttttttaagagacagggtcttactctgttgcccaggctggagttcagaggtgcaatcatagctcactgcggcctcaagctcctgggctgaagcgatcttcccacctcagcctctggagtagctgggactacaggtgtgcaccaccacacccagctaattaaaaaattttttttgtagagatggggtttcactatgttgcccaggctgttggcctcaaatgatcctcctgtcttggcctcgcaaagggctgtgactacaggcatgacccaccatgcccagccacttactttttaattggggtcctagctgagagccattttttgaaaatggctccttccagaaatagttaattttttccttctgaaaatctcaaacttacaaatacagtacaaatacttttttcctaaaccataaatacctagtgtaatggctaactcctgggaagacatcagtgagtatttcctatgttctcctacaatcaatatcaggagattaacactgaccaatttttaccttctattcctcagatcccatttaagttttgccaattgaccccaaaatgtccttttcatatcaaagacacctgttgtcatggcaactggcatctgtggggtggtgggagaggagcaagtcttcatcttctgatccttccagaccaagctggtgcccgcccagaagcccctttcctccccagctcagaactctgagcagctcatccacagcttggggggctcctgccctgaggccgtgtctttagggaaaggcagctgggtaaccgtgcacaaactgtcacaccccggatcttgtcatacatgaaaatactctccccctcccagatttctgcttgtctccactggggagcaaacactcatccccttcttttcagccccacccatcctgagaatactcactggtcccaattccctactcaggaggggggccgtaacagtcaatgacacacacctctgctctacctcaggaaatcggctttccaaactgggccacctcaagtttagaaggcagatgataggctgtcttacttaagccctgaccctaagccatagaggctccagcactgcttttatgtaatgtatttattaataactgcaagtttccagtaaaacagcatgtttccttggccatgattcctgaatttatgtccctcctacagggaagccctcagagaggtgagtgccacgactgccaaaaccaaacgctgacctccaccgtcacctccagatccactcactcagatgcctccgctctcaccctaatgagactctcgctgcttaattacccgattactcccatggcacctgtcttccaagcacagttcattctactctatcagactcacctattttcacttcctagtccagcttagttctcctaactgtccatcatttgttaaaaactgaacattttttccccaaattcccttgcctcattgtctttctgtcacatccaagaaagccccatccaggacaaatacaactacctgctttcctgacacttggacctgagctgccgggaaacatttaaaaaataattcacacaacaggacagaccaataccacgataatttattgatcttcaatctcaaatggactccacaccttgcccagctcacttgatttccttcatcaggttgttctccagctctccacataatgattttacatcccctctactctcaagcatgtgatcccacaccctcaatctacccattcttaagaaaaactcttagggaaaatataagctattaattgggcaaaaattccctcaacttcccatcacgaaacaagtacatttccctacatccacactcatcccgcctccacagggtccttgtgccgccaatgacgcgccttgcctgtgtcttcaatttcttcctctgtgagcacatgggaggctccgggaattaatccaagatcatctcatctaagcgcatctttcccaacaagcccaacaaccttacgagggcaaaaccttgacctctggcagcaccatggctccaagagagtaacagccacgaagagcaggtgctggaaagcagggctgcccttcactctcccacccaccagcccaggcacttgacaactttaaacaaataaaacatctctccaaagtagagctcttggacaaaggcctctttcaataagtattttataaagaatataagagcctttattcaatatctgcatatttcagaagcaactaaattttatgatatcagagaactgaagagtacaatgatgaaactagtttggtatcttttactatgagcctagacctaaatagcacaaggataacatgtccattttaagaagtacgccagagaaaggatctctatgattcccccacctgaagaccccatttggagcggccctttgtcctgtgtgtatgctgctatgataggcgtcaggtaaatcattaccttaggatgggctctaggtcaggatgtcgccgttcctcccttttcaaggaaccctgattcagggctcttaagatggtcttgtcaaaagtctctgaagacagttcctttggaagctagaaaagaaaaaccacaatatccaatgttaagtttctcacttactggtaaagatgttacaagttatatgcataaaatgaagattaatgcctcctgctcattattttcccaaaagcagtttgttttccaaatcttcacaacatctgaccccataatgaagcagcacagacctttcctactgggaaatgcaccatcttctgactgaacctcagggctcccccaggtgcagggcgacccacagcattcagcatgttcctgggacaggaggatgcctgcatggaccttacactctggctccacataccacactgaaatgacacccatgctaaggttctcgagttaaggtgaagattctgctcagcatagctagtactatttttaccctggaatagtattccaaggagtgttatctctgcctttgcacttagcacttttgtgcctcctgttttacgttttactctcaggcaatgtcagatcaccagtgctatgaagcaaataaagaactgaatatgagagacgggtgagaaaccctcaatattacttatttatataaaaaccacacgccagaggtgcctcatgtgattgaggtgccctcagagcaatgtgctagaaaccacaaaaaaatcaacacttggccaataaaacttttaggttttaaacaaaatttaaccagtttactttaaaaaaattcctaaattgattattcataagccaactttccaagtctttgaaaaattcagttttaaatttgacttttgataactaatctgtcctattactggcactttcactaaaattcagagtagaaccattaacaatatctgagaagccacaggaatacaaaaatctatacaaattgttgatttacatattgagctttgagaagtccgaagtaaattttcttctgaaaagtaagtattttgagtcaattcagaaatgagaaacttagcaaaggtagcataaagcattcctcattgtgggtacagtagattgcaagatcaagatgctctgtcagaatgaagtcccttctggtcagatagaagactctgtcggcattctacacacccgctgtgggaatcatgccctctgaccaccaggtctgaatctacccttcttttttttttttttgagacggagtctcgctctgttgcccaggctggagcgcagtggcgcgatctcggctcactgcaagctccacctcccgggttcacaccattctcctgcctcagcctcccgagtagctgggactacacgcacccgccccctcccccagctaattttttgtatttttagtagagacagggtttcaccgtgttagtcaggatggtctcaatctcctgacctcgtgatccacccgccctgaccccccaaattgctgggattacaggcgtgagccaccacgcctggcctacccattttcttttctaagagttttgctctgtcaccgaggctggagtgcagtggcatgatctcggctcactgcaacctctgccttctgggttcaagggattctcctgccttggcctcctgagtacctgggattacagacgtgtaccaccacccctggctaattttttttgtattttcagtagagaatggggtttccatgttggttaggttggtctcgaactcctgacctcagatgatccacaggccgtggcttcccaaagtgctgggattacaggcgtgagccactgcacccagcctccattttccaaacaaagaaatccctcatttcaatatttatattttgatattagcattttaatacagactgataacaccaggcatatatcctactacccattttaaacacaatttatactgaatatctgtacacagccaaagaaaaccagtgtcagtgaaaagtctatttcaactaccaaatcactgatggttgaactaaacactgaaggcaacagcgtataactattgacagttcagtgacactgttcacgttgctgggcagactgcaggtaagcagtcatcagtatgagcaaactgatttattttcaagtggtttttatctttaatttcctgggcatatttgcagtcctaaagaaagactcatttgctaaaaaaaatatatatatatatacagttttaaatcatgtcttttatattctagtcacgtgttttgaattttctcacctttcaatcctagttctagcatacccagcctcccacctccagagctccagctcagcctcagaactagttcagaggaatgaaaggtttttgtacctagctattacaaaagttgctctctaaatacactgagaccaacggataatctaatgcttgtagcaccccttgttcattaaatcattcagcaaactttcaaactcctactgtgccccaggcactgttttaggaaccctggatactgcagtgagggaagaaacaaaaaccctggctgcacagagtagacattctgatcatgagaaatgacagctgtaattgctaagaagaaaaaaacaggggaccagacatggtggcccacaccatgtctgtaatcccagcacatttggccaaggtgggtggattgtttgatctcaggagttcaagatcagcctgggcaacatggcaaaactccatctctactgaaaatacaaaaattagccgggtgtggtggtgcatgcctgtaatcccagctacttggaaggctgaggcatgagaacagcttgaactggggaggcagaggttgctgtgaacctctcaagatggtgtcactacacttacactccagcctgggatatggagcaagactgtctcaaaagaaaagaaaaaaaaaaaacaaacaaacccacaaaaacaggtgaagggggccagaatgcaaaggacacaggctgctatttgtatgggaaaaaaggacttgaaatattgacctccaactcatatttccacactacagcaagctagaagtacaggtcaatggggtctacagaagaaaaagggtgttcgtttggacacatcgtccaaaggacagattttgctcctgaactttttttttttttttttaagatggagttttgctcttgtcgctcaggctggagtgcaatggcatgatcttggctcactgcaacctccacctttggggttcaagtgattctctgcctcagcctccagagtagctgtgattacaggcgcccgccaccatgcctggctaattttttgtatttttagtagacatggggtttcaccatgttggtcaggctggtcttgaactgctgacctcagatgatccacctgcctcagcctcctaaagcgctgggattacaggcatgagccaccgaacctggcagctcctgaacttttgtagatgatgttaaaaagaaggtaaaagaaaaaaaggataaggtaaacttggaaaagtatcatacaataggcagtatgtttccagaagtacacgttgcagattatttcatgtaactgagaggcatttatactacttgagaaaaacattatatccaaatactggctaagcagggtgttcatcaattgctatgattctgaagagtgaattacttatttggagttgtatttgttttaaagcagctaagcttttcgaaaaaatgggcgactgaagaaatctgtcaaggcacaaacagctgaagcttccagagggaaagccagtagaaggcagactccatgcgccaggcactaggcctcagctgggggtcagctgcatgctctctcagcatgagggacagggaagcaggaccccacacgcacactggcaccaagtcacttggtctgaaccccccttttcaaggcttttcagcctcagctctgtactcctgcaactcgcccacaattctgttgtgggaagaacagcagaagggaaatgaaaacaggctactccttaacccaaatgaagcctgttcgtgatcacttgtctaaattttgataaatttcttctattgagagaaaagaaagaaataattagaagggcttgtaaaagtgtgtggcggtggggtgaggcagccctgcttagcctcctctgtaattagaacgtcattcaggcactcattttctccaatggggtgcactgcctggcagatggagcctgccccggtctaggccactcttctctggcaccctcacgactgttaccatgactgagcacagcagacagaagctcacagacctatgccatctctctccccaaggtgtccagagctgacatgtcacaggcagtggcctctagcatctggaaatgagtaaaactcatcccctaatcttacccaaggcaggtcactaatgagtgggaggagaagtcctcagcccttaactgacagagcctaatttataataaaccacaggaagatggaactattcaagtcatccctgggtgctacttcattcacagggactaataagaaatccagtggaattcacactttgacagtcttcctcaaagaaccagcatctaatgtgctattcaaagctctacaagttgatgaataaaagtctctcatagatttaagaatgatctgaaaagaacacacttatggtgacaagcagacaacctaaaactagcactagcctcataatatcgtatgttatatgtttaataactacacttgtaaccaaaacttagtaagtcagttgggaatgttttgtttctggactttctgctttatctctctactaacaataaattttaaaatatttgcttactgagaaagaataatttatcaaccatttatacctattctctccttttgatatgtatttctaactattcacttttcgataaaatcagattagtataaaagaaacaggtgatggtttgaacaaaatgatctaagatacctttcacctctggcaagtctgtaataagatgtttctattatcttcttattcccagtagtttggagattctatcatatggggggtgaggtggggaggagctggaactcaaagaaggaagaaatggagaactatttcagggaagtgcacagctgaatagttgtgaagtctgagaactcccaccaagcagaagcaagcctcatctggttctgcagacacattctctactaagaagtccctttgcaagcagccaccaatgacgcacatctctgcaggaaactaggaacagggttcctttttttttttcaaatagagataggttctcactaagttgcccagtctggtcttggaaatcctgcctcacatgatcctcccgccttggcctcccaaagtgctgggatcacaggtgcacaccaccgcacccggtctccattttttttaaatgtagaaatcccttcgtcatttccttatgttggtaatgtcaggtaagaaaacatttttagaataacatgacgttttccacagctaatgttcatttagagttctgagccaacctttatctgtatgttttaattttcctggtgtttttttgacgttgaggtttctggattctgtatattatataaaaatcattttaacaacaaaatctatattttaccttcagtagaaattcctgtagttcttggtgggtttttgttactgttgtgactgaaagatcagaccaatttacctgatttaaaaaaaacacacatattatatggttattccctaggcaggaaccggctagaaaaaagccatgtgcaaaaacaaagggccttacttaaattttactaagattaacagttagaaatataaagttaatctggcattgtcataatttcaaaattagtaaaattaactgcacattgacatacgctactcaaaaacgttctaataactcttttcaaaatggcactttttaaaacctatctgaaaatgtgattatgtttagtaatttttcagaaaggggatatatgttattttctatgaacttatagaactctaaaatgacacttttgacagtacaaatctttgccactcaaaagataaaaattctatctcctgaaacttactaggtatacacccttaagggaaataactagagtttactgccttctttggtagtaccatttcatatttttatggaatttatggttcgaagagatttcatctttatctcaatctttaaaatcctattaagatgctagggccaggtatgatgacttccattttgagatggagaaacttaagttcaaacaagttaggttactgaggtgtgtgactctaagtaggttgcaagagtcagaactgacatctcttgtgctaccccatacccactacctcctcgatgcttttcatgtggactcaactgtggccccctaaaaatttctaccctataattatttgagctaaataaatatttgcactatgctactgtctaggccttaccaacttataagtaatcagatagttaaaaaatacataaaattttatctacaagtctaaaattggtatctttattaactggcacatttatttactttactggcacattacatttcttaagtgatagtattcaaatgtttgtggagcagctacttgtgttgggcactgttctgactcttgtgtcagggatgcagaaatggacaagacagttaagtctccgctgactgagttcacaggctagtgcaggagatagatcaaagccaagtgaatatataagaatttccatcagtgatcagtgctttgaagaaaacgcatagggcatggtacaagaacggagagatgcacatgaactggggtgtcaagaaggatctcggaggagggagctttagagccagaaggtggcctgtcctcggtctggggaaatgggggaagagcatttcaggcaagaggacagtgaagcctttaggaaggcaagctgtgagctccagcagcaaaagaggccagcctgactgagcgtggagagtaaagagcgagacgcatgccgcagtaagacaccaggagatgagggctgaaattctgcaaactgaggatctttctcccttaaagcaaagctggagtttggaaattcattcaacgagcaagtggtgggatggctgaggatgaagaatgaagattcctgctctccatgagaatatctactggaaagatctgtgaaaggtacgagggcagagtatcatggatgaaggagaaaacattctagtggagggtcagaaataactccatgagagagggacagccaaaatttggcaagcaatgcctttggagaggaactgaagtgaggattcacaaaaacgtggcatggttccacctggcttcagggtgcgtgccatccaacctgaggagaaaaggcgtagctcaagcagggagaagtaaggaagatgtggacaaggaattcccgatacagctgacgggcaagaagaagacatgcaaagtcttcacctgggagcacagaatcagagctgggctctacagctaatcccagctgtggaaaggacgggcaccaaaaccaatcatgggtaagaagacagggcaatgcagtggcaataaaagcgtcacagagaacaaagaggaggaggaaaataccagggagaacaatgccaggaaagacaatgcctgtgatcttgacttaaaacacaatggcatttttaaagatgtatcttacatcttaattgcgtccctaaatctaaggctcttacttctttttaataaaatagccagggttattttaatgtgatgtaacttcaaaaaaacttggcaaaccatgcagtagtatatgataaaaaacagtacattctcttaattaaaaacaaacatatataccttttcccttaaattagcaaacctgccacaagttttcccaaagatcattgagcacagcacgtgaggtatcttttgtggggaaaatggcttactttgaaagtgtactcccagtatttgtcagctctttttctctggactcctttcaacattatcttctcaatgtgtacagctgaaagaaaaaaaacacacggtgacttgtgctacaaagactatagacacatttcacttacctaaagtaaccctaaaagttgacaagtgcttaacaattaagctactcactttcatctttatgactggtcttaaatcatgaaataaaaaaaaagaagacaaaaaaactagaagcatagcaatgtgccatccacccatgaaaaaaatttttttctatacccatacgacatgctgagtgtttaagtaaattcaaacactctattaacaccaaagattttaaggataaaaataaaaggtacctgcaattaaaatatttttccaaatgataatcttccaacttgttattcagattaccacaaatacggcattttaatatcaactaaatatggttctttcaattattaatacatagtaggtataaactacaaaatatctagttttacatttaatttttttaaaaaactactcaaaagtaatataccaagctgaggaatttaaaaattatttgtctcaaatgtaaccctcaatatcatataatgataaatataaactgaacattataataaacgttcattgtggcaaaatttttttacattacagagataaaatagtaaacataaattatattaaactttaaaacactctgaattgaactagataatcagtttattcatgaagtaagcaaatgtataaatcccccaactatccattttacgacacctttaataaaagtaccaccttaggaaataaatcaatttcaaaagagccaatctacaaagcgtactctactctaaggacttaaagacactgctgttcagggtatgaacagaagaaaccacactttcaggataatgagggaggtaatatcaggctgataatgaatatgctaaaggttacagagaagaggttaggaaagtaactcaacagaatgggtgtggggggtacactgttggattcaggagagcaggagatggaggaaaaaaggggcattcattcattttgccttagaggaagaagttaaaatagacaaagtggaatacacaaagtgacaaaagcatagaggaggagtaagactgttaaaagaccacggaaggtgggcagtgagaaggcatgaagcataagatacagaaatacacaggggaaaagacacttataataaacaaaggatataacattaccagtattttgtgtcaacttcccaaatatatagtgtttggtggcctgcttgtgggccagtttcccctttgcgggccagaaatgttgaggatggaaacaacggaaaatctcaaaaagccaggcaaaagcctgtaactccttagaactgtgcaataggataagagccaaagtggtgatgggagggtatgctgtttccaaaagctgttatattaagttaaaggatgacgccattcaacaaaaatcttctgaactaatcttatattcagaaataaagcagctctacttctgcaaatcattggtcccctcaagggtaggggatcttgggttttgtttggtcagaacccagttttgcttagcagaaaaagccactatgacattacaggacatgggaacacagcttcagtgataatttcaagttctgtctggtgttggctaccagaatcaaggtaagagaagacaggagtatgtgatgaggaatggccatagtgaaagtacccccaaccctcataaattaaaactaaaaagcatgtattacactttttaagaagtaggaatacaagaaaaataatctacagtaccacctttacagttaattgtcagcattttgatataatctctacgttcttctaaaatatttttattaaaaaaaaggaccttcattgtaaaaccaactccacttcaggttattcgtatgttcaatgagtttagctgaagtagtctgattaaagtactttagttgggaagataggagtaccgtgatcgtcttgaatagaagtggtcattatataaacacttatgttcaacattaaaaattcagacctatttttcctctgtgaggaaaaatgtattacacaaaaaggattattactggtaaaaaaaaaaaaaaaggagacataatgacataaattcaaaattgttataactgagtgtgaagcttatcatatatccttggctcttttaaagcccagatggcagtctacattttccatttcagtttctctcccagcacaggttaatggctccccaaatgcaaagaggaaagaataatttgaattcattcctgttcagatggcaatgtccttccacccattcattccagccctcttaaaaactgcattattgcaggaagaatggatttgtaagtaacttatttactcttccagagaacttgtataaaattcattttctcagtagacactgagctcaattctgcaaataaagcactatactaaatactctgggggtctctgccccccagaagcatgcaaccaggtttaagattcagccaagacaatggactacagagcagaatgactgtgtgcgtgctaggacaagcagggctgtggcgcaggaaacacccagcgtgcagatggcagaactaggaggactggctcttgagtgaagcctaggaccagtaggacttctccacttcaaaaaggagagtaaaaagtttagagttaatcagcgtaaagagcaccctgtaatcttttgatgtattaatgctttaagtttacaaaaaagagagcataccttctcgctgagctctgtgaggtgccacggtaagtccgtcctgaggtattggagcttgctctattaagctgctctcgttattttgcatgtaatcaccatgagcagagttgttctagatgagaaagagggagatacgttaacttaaaccatggactaagagtaataatcacagatttaggtcttctcattttactaacaaccattttagtggcaatttttagaggtccaataggtgactgcacactatgggcacaaaggcacagtgtgagagccgcaagcagaagatgagcactctattaattattgactgtcctagctttcttgggacacaggaaattgcttaataatatacagagttgccaatgatgtcaattctgaatccaaatcaaaggaacacataacaaatggtgccctttacactaatcctccatagggaacggcatgtgtactttttacaagaatcactacaccatttttattcattgtttggttttaataacagtctaaaaagatgctttattaggaaaaagtcttatgaaaggtatcatcaatacatgccaaggatttctaaacaagaatatgtacaggcagggagtttaccattaaggttcagtcatctaacagcaactgggtgctctaaacctaactgagtttgctcagccaatcactagtgaaccggggtaactttgactcctagatccgatgcttggagtaataaaggtgatgccaaacttacaaacagctcgccagaaatcaagcactgtcacatacaaactgttacaacatcatattaagtaagtaaataaatagccttatgacagttttttattacagcttgcaccttatcccctccctttatgtgcagaatctcaaaacactactcatatcaaaatcaacttggttttaagaatcaattatgattttacaaatctgcagtaaacatacattaatatttttttctgtaaaaaattaggcaaatagaagaccctaagctccccacaaatctcaatttaaaaatattttgttctgctgtctaatcacacatcccgacccgacagtaagtatgaattgctctgtttatgagaacagagcacattatatacttttgggagctaaacttctgccttctagtctgtcttcctttatttagaaacccaaggaaacaaagactgtctacctaaaaccatttaataaggagagtacagacctcttcagtcaacatccaacttctgaaacacttggcctgatagcctttaccaattttcaatgcgactggttttttaaaaatgcagatatgaattattttaataacaaaaccatacatatcctaacccagaccatatattttattaaaaaatgtaaaaccacatttacccacgagagattctgcttctcaaaaattttaatattgctgtaaatactttaaaaaacaaagaaaataaagtgctatataatcctctcaaatagttgtgttaactggaagaagcttgggtgaataggttaaccaattctttctttttttttttttttttgagacagggtctctctctgttgcccagactgaagtacaccggcatgatcatagctcactgcagcctcaaattcccggcttcaagtgatcctctcaactcggcatcccaaagtgctggaattacaggtgtgagtcattgtacctggccagtcaaccattgcttaaagcgaaatatttctctacattgctcatatatagttcacaaatttaaagcaatactttcaaatgtaaactaatgcaaaatatgaaaaaaatgttttcattagtgagatgcataagaagataccactttatacccattaggatgactattattaaaaaagacagtgttggcaaggacatgaagaaaatggaacccttacacattgatggtggaaacaaaaatagtatagctactgttgaagacagtcaggcagttcctcaaaatattaaacacagaattattttatgacccagcaattccacttctaagatacacccaaaagaactgaaagcagaaatgcaaacataatctgtacatcagtgttcatagcagttattcacaatagccacaaggtgtaaactcaaaacccatcaatggatgaacagataaacaaaatatggtgtacacatccaattacctatgattcagccttaaaaaggaatgcaattctgatacataataggatttagatgaatcccaaagagagtatgctaggtgaaataagccagacacaaaagaacaaatacagcatgattccacttatatgagatacctagaatagtcaagttgataaagaaagtagaatagtggctaggtgtggtagctcacgcctgcaatcccagcactttgggaggccaaggtgggaggatcacataaggcaagtatttcaagacagactgggcgacactgcacgatcctatcgctacaaaagaattttttttttttgttagccagaagtggtggtatgtgcctgtagtcctcgttagatgggaggactgcttgggcccaggagttcaaggctgcagtgacccatgactgcgccactgcacttcagcctgggcaacagggcaagaccctgtctctaaagcaaacaaaaaaagtagaatagtagttaccaggtactggagggaatagggtgttattttttaaatgggtatagcatttctgtttgggatgatagaatgtttggagacagaggtgatgactcatgacaacgggaacgtacttaatgctactgaaccgtacactaaaaaggagaaaatgagaattttatgctatatattttatatcacaataaaaactaaaaatggaaatgatcacactgcctccacaaacattaaattgaagcaactgtatgaaagtagtttgcttcacaatcaaaatcacatttttgaagtctgaagttaactttatgaacccaatttaaccaagtaacctcctgtttaataacctagggagaaaaatgaagtttgagtttctatccaaagtcctaagttcatcaacccatgatatatctactaattaaatgtttattttctcctccaagtctcagcatgtatcaatgctataaaatcacgtagactatgtttagaagctattactaaactcactcatgtaacgctgcatgagctggagatgagaatcggcagccccaatggtgggtggctgctcggcgatgctgtctgccctgcactccctctttactttccttagggggatgggtagcataaaatctgagaactccttctttaatggaatcatataaagaggaatggcacccactttatctgttaagttcagattcccatgaaaatgcagaacagatgaaatgccagaatcagtattttacaaagactagttggagaaaagtgtcaggaccacgagaaaagtggatttttctctgtttgtatcaagaaagcagggtttaaagattctaaacctgcaaaaatacgcacaagcatacaaagaactttagtaggagtgcattctcctttcttaactcgcctgaggcagagcttcttctgtcctatcgcttgcctcaagagctactggttagcacaaacctacacggcatgtggttcaggtggtctagatggttttgccacagatcacacgtagacccatcacaattacatacttgagatttcttaactgtggggaccttgtgaaacagccaagtagctggacatcctaaaaaactcttctctgaaaacataccattagaacaaaggtcatagatggagttttagttcgtctaacaatattctacatggttcttgtagtccctcgatatagactataaatttaaaaatccaagatattccaaatataataacacagcagtaagagttttttattttttaaaaccaaagtcactaacttcttctgaagttttcccaattgtcaaatgagacttagaaaattaacagcaatatataacaacattctattaagcttccgtggcggattaaaggtagctaaaaattatttaatattcctcccgctgaaaagtggaaccaattccccacccagtggatctaggctggctttagaatgtgctggtggtgatgctcttctaaagttaggtcctgggaagcctcagccctgggcctcctggacacttgggcttggagtcctgagacaccacatgagacatgcacttctcctggcagccgcacttgatggaccacgtggagagaggagaggggtctagggatgccatctgggccccagctgtgtcccagacaccctagaacagagacaaactcttcactatagttatttgtctaaatccctcacccacaaaactgtgagagatggtaataaaatggtcattgttttacaccactaagtttgggggtaattctgttctttaaataggcagattcataggtctcctccttcagcactggcatctgtgcttcctttgccaacatgctctcactacagaaggaaaacatcttttaaccctagaactaggaagatgatccagaaattgctatatccctgggccagcagcccccacatctttaagtccccacatcagggtgttctggggtgaggtgaaaagaatgcatgcatgagtgcacaaggatctagagaagcgcacatctcctccccagcccacatctgactctgccttcgctgtcgcagtctcgccccacgagagatgagggagggaggccaaggggtcgtcaggaaggatgtgagcctgggctcagaagctggaaggagcttccatgccttctagcacctgcagcagagccactgcttcacccccagtgcaaaaacattcttggaaccttgtagaaacataagcttatagaacctaagaaggatctacggcagtaactgatttactatatagtgttgccaacactgcattaggacttgtgtttcacaccactagttattatagaatgggcaattttcccaaactaataaaactactcaatactcaatgccacaacctctctgtatgagggatgacctcttttcaagcaaatactcccaaacattacagcatttggttcacatgtgaccatgccgtctcccatttaggaccaccagtgaatttcaatcatttgatacccaagacaaaaatcaactgtactacgggacacatcccaatttagacatttctaacaagaaacataaaaattccccaacatttatgttatagagcgttcacttcagtgaccaaagtttaattatctttccaatcacacaaggcactaccccaattctacatctgactcacaccacccctcaagtagatcataaactggagatcaaacactacaggctacctaccatcaactatccaagcaataagaaaataggttaatatatgacttttccatcctatcaaaatgtcactgctaggtctgcaccaatttatgcacccacacacaaaagctcaattaacacagggagtacaaataatcagatttttttttttttttttaagacaggatctccctctgtctcccaggctggattgcacagcaacgcaatcacggctcacttcagccttgacctctctgctcaagcaatcttcccacctccgtctcttgagtagctaggactacaggcatgtaccaccatgccaggctaattttttttagagatggggtcttggtatgttgcctaggctgctaatagtctgatttggaaggtatattaaataagcacagccagtcagcatccacccattgaagattcaattcaaatctacacttgttccacgctttttatataaagaaacaattcctcttatttccaaaataactgtacctatcctatataactgcaaatttttttataaagtaaatactggtaagtacaattcaaaataagacaaaatcactgcctgatatacttagtctttttttttttttttttttgaggcagagttttgctcttgttgcccaggctggagtgcaatgtcaccatatcgggtcactgcaatctctgcctcccaggttcaaacgattctcctgccttagcctttggagtaactggaattataggcatgcaccaccacgcccagctaatttttgtattttttttaaatcagagacagggtttcactatgttggtcaggctggtctcgaactcctggcctcaggtgatccacctgccttggcctcccaaagtgctgggtttacaggcttgagccactgtgcccagcctcgatatacttaatcttaaagcagtgtatcatattggtattttttcttttttctttttttgagacgaagtctgactctgtcaccctggttggagtgcagtggcatgatctcggctcactgcaacctctgcctcccgggttcaagtgattctgctgcctcagcctcaggagtaactgggattacaggcgcccactacacgcccgactaatttttgtatttttagtagagacagggtttcactatgttggccagtctggtatcgaactcctgacctcaagtgatccacccgcctcggcctcccaaagtgctgggattacaggcgtaagccaccacacccagcctcgtatttttcaaagctatatattttccaagtccaaacacaggaaattatgactgagcaatgatgatatatacaacactgacaaaaaaatgaggcacaatgcccgagcctttggggaacttaaaattctagtgtgaaagatcaaatttatttatttacttatttttaagacagggtctcactctgttacccaggctggagtgcagtggcatgatctcagctcactgcagcctctgcctccagggctcaaatgatcctccaggctgggtcaagctatcctcctgggctcaagtgatcctcctgcctccgcctcctgagtagctgggactacagacatgcaccactacgcccagctaatttttgtatttttctgtagagactggtttttgccatgttgcccaggctggtcttgaactcctgggctcaagcaatccacccgcctcagcttcccacagtgctgggattacaggcatgagccaccacacctggcctgagaggtcaattttaaatgttaaaaagacaaagaatcacagaagtaccaaaattacaacgatatatgtgcatctaaaattcagtggcagcaaataatcctttaagactgccacggggacaattccagaaaacatcatacaagagacaatggcatgaacccagcctagaatgaaaggggggatatatgaaaaaagagtggaggaggagattttgagtctaaaggcctattagaggccagggtccatcagtcactcaaagaaaagatagtatgattaaatgttgctttagaaaggtgtatctggtagtagtattaaacgattagaagtgggaaggctaaaaagcaggggaatcagaaggctactataaaagtcttggcgtaaagtcccaacagagaacggtgtcaggcaaggatgaggaaagtgtgtattcaggatgtgatgggagaagacgatcaaggtcatcaagtaatttggagtgactagaaacataatggtaccattcagagaactgagtgagtctggaagattttcaaaaaatcaatcatgtattctttttatatagattcacattagagtgacagttgacattcaatgagatatacaccataagggcgcacgtgcgcgcgcgcgcacacacacaccccttcactggctcccactggaacctactgacaacctattattttaacatgaccttcaaggccctcattataacccaaccctactatctcttcaaatgtctttcttttcctctttcttctctcctttttgaaacagcgtctcactctgttgctcaggctggagtgcagtggtaccaccacagctcactacagccttgacctcccaggctcaagtgatcctcccacctcagccttctgagtagctggagcctcctgagtagttgggactacaggtacttgcctccacacccagctaacatttttttttttttttttttttttactttttgtagagatggggatctcactaagttgtcagagttggcttcaaactcctgggctcaagcgatccctctgcctcagcctcccaaactgttgagattacaggcgtgagccaccgcacctcacctaacatctgtttttctactcatccactgcaaccaaattgtgctaatcgctctatgaataatacatatatctccttcttgtttaccaagcattttcacttacattaacacattcatcctcacaacaattataggaaacagataggaatgatatccctattttatactggacactctggactttgggaagaccaaataacttgccaaaatgaccttttcaaaatataaatctgacctcaaataaatgacttattgaatgagcacaaaacatttctaatgaactgaggcatttagaaaggaactaaaggtcaaatgttcccgagagcataggaaaaacagaaggaagccaactacccccggcccagccaggctacacctgtaacataaacacccgattaggcacttcctttttagattgattgtttacagaaaaaggaaccccaaaatgtcagtggatgaatgaggcttttgtgacaaagaattctttgtaagtaaaagaagtactgtcacacacagtcctccataacgaaaaacacagtcaataaaataagttcagtctgccttgacagtagtacaggcctttttgcttccctttaaaaaaaaaaaaattagcttaacatttctcaagagaaaaatattaagtgagttaaaaataagccaattcaacagcttttataaaagtaaaaaaatgttcttaattatccatggattctagtctgtgctctgaactaacaaagaatcatgtaacttaacaaaagtgcaaaacagatttaagttatagaatagttttctagctaaatgtgaaaacaggatcaggatttaagtagattacaactgcacgataattaataataatctaaatctaaaacatgcactttctccattcccatccccaaatccaatacgaggaaaatatctattttaatgttctgtgactcacagaattccttcctttgggtttatctgtagaacactgcatctttacaagtaagtactaacaaaaataaaataactgctccaaataaatgtggctcaaataccaccttttcaattgcctgtccttcccgaacatcaatgtattcacagggatggtaacagagaatatacaaaatactccactataaggatttttattaggttaaaaaaaaaacaaaccatattcctgaaaacactgcaggttgtgttagtggaaaatatgcactgagcactaatctcaagaaagaatgcatgctcaagacagtatgtgaattatttcacatcttattaatacaatcatcacctcaaaagttattatccccattttacaggtaagactgtaaattatccccattttacaggtaagactcagggatttaagtggcctggctgacaactatcacagctagtggcagagttgaaacgtaaccctccaagcctagggatctactaaacatggctatcattcttcaaggtcttctcatagcctctatgacactcttcctgaccccttctccacacaaaaaaattattaaggcaacatgtatgtatagtacatataaaattatcccccaatacccatgaggaattggtactagaaactcccaataccaaaatccaagagtgctccagtctggatataaaatggcctagtatttgtgtataacctatgtacactctcctgtatactctaaatagctccagattacttatatctaacacaacatagatgctatgtaaatagctgttatactgtattgttttggattacaagaaaaaagtctgtacgtgttcagtacacgtgcaatatttttccctaatatttttgatccatagttggttgaatccccggatgtagaaaccatgggtatgtataaataaatcacacagacatattttagtcaacttgagagaaagaatgtacttcctctccacatccagcacccgctcccgcctcccaccatggtatacatgagacttagtttctgagttctccttacctggaaaatgactgcatagaaaaatgtaactggggaaggaactcaggattttaatagttatttcctactaaaataatcactatttgatatattctaaaaagtctcttccaaatggcttttataactgaactgcttttattctttgctgtagccaaaccaacctaaaatttcccatgaaagacatagctgtttctggcccccattctcagtatgtaagatgctgtgcccacttctctaccaccaccatccacacaaggctgagctttcacctgcaacagctaatatttattgaagaccatgaaccagacactatgctacaagttaaggactccttcactgaaccctaacactcccagagtggcgggagggaagcctcagtcagcacccactgccccaacaacactattcactttaaaatatcaaataacccagcagcaggggtcagttaaataaaggtatttattaatattaccagtgagcattagaactggtcatttttaaaaagcatcttttttttttttttttttttttgagacgttgtctcactctgtcacccaggctggagtgcagtggcgtgatctcggctgactacaacctccgcttctctggttcaagcaattctcttgtctcagcctcctgtgcagctggcactacaggcgcctgccaccacgcccagctaatttttatatttttagtagagatagggtttcacctcgttggtcaggctggtctctaactcctgacctcaggtgatccacctgccttggctttcaaagtgctggaattacaggcgtgagccactgcgcctggccaaaaaatcatcttttttagtgcctgctataataactgaaattctgacaatcaaccttttccttctcattttaagtcagttactctctcactaggattctggctgccacatccacattcaagttatcttgaagtagcatcgttgatgttaaaactcttttaaaagttttcttccagtatgtttcctatattgcgaagttaatcaaagtacttggtctatcaagtacaatttagctaactaaactacgctatgaaaaagtaacaaggttttttttttttttcccgagacagtctcactctgtcgcccaggctagagtgcagtggcgccacctcggctcactgcaacctctgcctcccaggttcaagcgattctcctgcctcagcctccagagtagctgggactacaggcatgtgccaccatgcccggctaactttttttgtatttttcttaatagagatggggtttcaccatactggccaggctggtctcgaactcctgacctcgtgatccgcccacctcggcctcccgaagtgctgggattacaggcgtgagccaccgcacctggccgcaaggttttctttttaattcactacttttagtaagtgaaggactcatggctacttgatttttgtgaattcaaatgatgaactcaaatatgttttgtgagttcaaataacacaaagacataggataattttgtgccttagtatcgaaagtttacatttttatctttcattcaaacattagtactgttagtcaagcaattaagctttgaagatcttggtgacacaatctccagagaatcgtcataccatattaatcaataaccactactatgatcgtctacatattttatgcttcttatacctttgtgtcgctagttggggactaaacctccaaaatgagaatacccattttcccgaacagttaacgaatgtctttaagtatgcaaacattgcttgcatgtcttgcttcctgtcttttcaatgaaacagcaacaaaactagtaccttttaaaatacataggcatttttttgttgctaacacacaatttatagtttggcttcctaataataggaagacacccattttaaaaaccaagcgttttcagctatgctatataagcagtctgtaacttcctaacacaggattgtaacaatcacacagagttcctaggacactcacagtagtgagtgacttcactactgctccctggcctctttgctgaattttgtacaagttactggcagtccaccgcagttgtgtgaggaatgtgagatttatgtacaagcctcctaaaaaaactgctgacatttaagttgtaatccaatgtaatatttaccataaagtcatccaaataatagaaaaactctagaaatgttactcttaaaagtaaaaacatccttgttgagctttcctgtatttccaatgtagcctaaaaagtatatattctaccggcaacctgtgtacgtgttatacctcaactattaacattgtaaccatggcatgtcactaacagttgctgggcccagtcaacttcaaagcatgtaatataaaattggcattaaagacatgttctgtctgtaaatgtcattagtttttaaattttttaatagacaagctgattcagtactggatacaaggaagtcctgtgagagccaggtgcactattctgggccagtatacccttactttaatagaaaagagaattaaaaagatgctaactttacgttaaccaatagtaaggctgaaaatacgtcgtttggcacaccaaagagcttcacttagtagttaagaaaaagaatgactcccaattaaaattgcatacttgtgtctaaaaggttactttcggggggggggggggcgggggaaatgctgccacacgaatttccctttaccagggttatcgccacggcccagtacggcccagcgcagcatccacgtggttctcgagtccgcctggaagtctccggcgctagcccaaagcctggcctccgcgggaagaggccaaaagggcgccgggggcggggccggcgcgccggtcacgtgggaggcgcgcgcggccgccatcttgcagggcgggggcggggaggagccccgcgccacggaccctatatcgccgtgcgctagctccgggcgttgcgtgacctccgagcccctaaggcgggtcgcggcgcctccacgcgaggggcgcgcgagctttgggctcatccctgacgatggggaggtgcgcccgccctccccgggtgcgcggcggcggcggcgggaggccgagaacagctgggccggactgcagcgaatgagggcttaactcagcccacccacatcagcggcctctggagtgacagcctgggagcaacatcatcagataaaaggtcaaggccagaacaagccacagctgggactcggaggtcactctacgcagcagaaaatgcggggtcgtaacaacttaatgagatgtgaatgatgtgttacggtaaccctaaacaactgctggagaagttcaccacacaccacgcatctagaaatagcccagtgtcacctgtagtacgcggcccctatgatttattcccccacttcacttgacacgtcctgagaagcagtgatgtgctgacgttaatggcaggatgcccaacctcactttgtccatccctcccagcactcactggttgcagaaaaggtcacgcattgcggtcaacataaaaatctcattactctggtctgcatgcatccctcccctttctctacttgccctccaacacgcttattaaaaacaaaatttaaagaaagaaaagggaaagaaaaaaagactttcagcagttaaaatcagaaatcaagtacctttgttggaatagtatgaatggaatgatatgaggttccactgtgggacattttctttagacctgcaatttaaggctatctttacaatattgtatgttattacaataacattttaaataagcattgttcctgaattcatgtttttgtctctaaatttaatggctgtgcggcatataggacttttgggaaattaacgagtaggctgaagagtggaggaggcttttaccatcagcacacgcactgcatgctagtggtaaacaggcgctggaagatgacaaaatttcaaactcaccgagataatgctgggcactagagcgttacatctgagtttgataaaatacgtcccaaaacatgaattagttacctcacagaagcgtcgttttaaaaaaggggttcaggctagattatctctaaattccttccagccccaaatccattgattccacgggtactgagtccacaaagccactagtgaaataccatgcccaattttagttctggggtactgaatgacagcagatatatatatactgaattaacgttcaagcaaggagaggagaaaatccccttttccattatctcctagagatcacctaagctgaaaaacatggcatccaaatcaacacctttcaaaagcctgtgaccccacaaataatctcactttacagttctcactcttactgaaacctactccccaccttcccatggaaaagtcctcctcaaagactcactggaccctaattatcattaaattgctttcatggctgtaaaaaaaattcatctttaatgtttgcgacaagtgtctcatctggattctcgtctactacattttggtgtttaagtgattcttttgggcaacattaacgcctatcgtaaacgctcaacaaatatcccggaaccccaatctgtaggcaggaatcaagcccgtgagaaagcgcgtgtgccggagggaaaaagcatcccaggccgcgctagaaaaggtttctctccccggacaacctgcgttactactcatctcagatccattcgcaggtctctacgtcagatgtctgctgggaacacaagccctcagagcagaagccacaaggacccgtacgaccccttttaactcaggcacacactgggcaaaaaaagtccctctgtgccaaagacaagggcagctcgccgggagcgcaccttcaggacaccccgccgagggcccggcagagcccggagacgggaggcggagccccggccaggcaggcggggaaggacggcgctgcctggggctcactgcggctggctctcacacaggttcctccagcgcccggcggctcccgcaccgagcgctgagatgctcagagccaaaaacgtcccgacacttttcctccgagaggggccccgggcggggagctccacgtcttccgtggcaacaccgtggcacggaagggacttctagagcattctgtgatggcgggtggctgtgtctgccggggtgtggggtggggtgggggagtggaacggagcggcccagcgagacgaagctcagccctctggcgctgggagctgccgggtggggattccgagccacctgcgccgggctggggctcgggcaaggggcgtccgagagcgaggccggggaggccgccggggcagcgatcgcaccgcgagtccagggaggctccgtgcgccttacctgggccctggggccggcaaacttgcacggctctacctccacctccgcgtcctcggggcccccgcggagcgcggcgcggagcctctccaagtgttccctcagggtgacccgctggtggaaggagaaagccgggtgcagcgaggccatggtgaagagcagcagcagttcctcctgggccctggagccaagcccgccgccgacccggggctccacaatgccgccttccgggcctgagccgtccttctcggcgtcctgctcgccgtcgccgtcctcgccgcgctcgtcctccgcgccgccccgcgagccctcgccccgggccgcgcgcaggcttttgagcaccgagtccacctggggtagcaggcggtgcagacggccagcggcctcccggttctccgagcccagcagcgccaggtagacgatgaggcgcgagcgcaccgcgggctctcggaagtcggccagcggccccgggtccgagaggccgttggccttggcctccgagtcgcgcaggtagtggtagtccttgcgcgccaggtcctccaggcacgagccaaggaagcgcagctccagcgggttgcacaggtccagcagcccgcacatgaactccaggcgctgcgccgagcccagcaccagcccgaaccactcgtatacccgctcctgctcgcgcagcgccgccgagggccccccgccgccgcccggcatacccgcccccgccgccgctccaccagcaacaggcggcccgagtccccggggcggcggcggcggcggcagagggccccgcgacgggcccgcgggcggcggcggcggcggcggggggcggcagtcgcggcggcggcgcgaaggcgccttcgcgcccggccgcgcgtccgcctcgggctcctccgcctcgggcggcggctccgcggggtgcgttggcttcagcggcagcttcatcctcagcatcctcggctagggcggcgcagacatgcgagcgggggcgggcgggaggggccgcgaggtggagcacgggccgaggcggcggcgcggccgtcaggagcggggcccctccatgccgccgggggagggccggggccgggggcgggtctcggccggcgaggggggcggtggccggccggcggggtcgctggcgtcgtcttcccgggctgggggcggggcgtgcccgcgacggctcctccccctgggctcctcgccggttctgggagcccgggtgcgggtgggagcaagcgagcgagggtgtcctccttccgcctccctctctccgccgtccgcgctgagccggggcggcggtgcctgagctgttccctcgcgagccggtgaggacggagcggctgggtgaggaggtggagcagccgggccgggcggagaagcttgcgggctccgcgcacctcacctccgccaatcagcaccgcgaatcgacggtgacgtcgctctccccgccccctggggggccgcctttctccaggaagccacgcccaactgctggccggccgcctccctctcggcggcttccgtgcggtcctaaaggctggtgctcggcaggaggaggacgcgggctggggccgtggggcggcgtgagggtagcccgggagcggtgaggagcgtgcgaggcccacgtgagcggagggacgcggccgctctcacctttcctgagggccctggcccggctttggactcctgattctcctctgcttgccagctgccgccccgcctccgccagtggtgcccgggctgcctgcgcggccggagtgaacgcgtcccgggagcaggggtttctccgaagtgagtgcgccagccccgggacgagctcgttcgagtcctcaccgcccagtgcacttcctgaaagccggcggtgggctgtctcccaccttgtgaaactttgccaggtgtcgctcacaggggactgggtccggacgcgggtggcggcgctggtttgcggccccggtttgcggccccggcgccgcgatcccgggccgcgcccacgcccaggctggaggcaccgtgcgcaggtggggacgcgcggccgggaggtgcgcagcgggacccggccggccgagggtgagcgctgctggggacgctcctagtctgtaacgctctgtgaaaattatttcctggatagtttaggaaaagcctctcccttccccgcccctaaacctctatcttttgggaatcattgatttgctaaatgacatttcggtgcctaacccattttgaatccttgttctgctgtgaatttcatgtgactggaggaatttaataagctaccaacttgacaggctttaaacttaaaaaaaaaaagttttgttacgtttttcagatttaggcttccaagatgtttacactcgcactgttacttttttttttttttttttttttttttagcaacatagtccaaatttttaaaactcagctggatcttttgagggttaattaaaaggtgggttaaaaaaaatcttaagactttaaatttagaagtcctactacagctatgtagtaggagtatgcagaaagataagaatcacattgtaactctttgcggtggtgctggaacatctgttgggagagcatatgctgaactctgttcacctcacaagtttatgtcctaagaggctcattcacagttcagtaaaagggtgaactgaagcctgaatcagtttcggggatgaaagggtgagagggagaactgttttcagcacatttgaggttggcaaaatatataaaagtcactctttcttgtaatttgctagttctttacagtctttagatgtaatttacagccaagaaaactttattatgaggacttatacgtcattgcccttttttgctgtcaccctcaactaccctgggatcttctactcatatctcatctcctgttcccacttttctaaagcttagggtgaaatacttaggcaactagtaataatattaatcttgctagatattcacaggttcatagtgagccagctgtctagatctggatatctagtgagcaaataaattctttacctccgagttgatttttgttttattgatcgattgacacagtcttgctctgtcacccaggctggagcacaggctcaagcagatcctcctgcctcagcctctcaagtagctgggaccacaggcacgtgacaccacacctggctaattgtttgtatttttttgtagagacagagtctcaccatgttgcccaggctggcaaattgagttttatatgtgacgcagtcaaaggggcattttccttggcaataagaagccatttgatatgaactctccacaatagttgatgcatacattttataccagaattcaaatttgtaatcaataatgattacttgggtgtttatagctttggccaacattaaacaatatagtgatcaaagcttatacacataagtgacatataccatgatttaatgattttggttatccatcagctggacaatttgttgtttatctccgtctctgcatactgcagctcacaaggaggcctcaatgttttttccatgttaccataagtgagagaacacattcagtaagagtgaaaaaacgctagtgcttttgagggaggggccccgatggaagtcccactgtgacatgtgagtttttaagctgggaaaactaccctgatgattctagtaagactccctagaaagggattcctcttagccagcctacctgttgagaacacctgctctagattttctgatttttttttgtattccctgcataatcaaatcatgtgggccagataacattattgtgatagtggtgagtgtgtggtttgtatccaaatattttataaagaaatatatcttgtaacaaaaaccaggacacaaagtattattgtctcttgtccccagatgatatatatatttttaacttcccatactacactgatgtacctagatgatgtttaatgcacattcagtatattgttttatttgcctttttaatagtgaaaggtgtcattattcatataccatgccataccgtaatatagctggtattattgtccaagtatttatatgtaaccagaaaactgattccaagtgaaggtttggatgaaggcactagtgacggaggaggcttttcaaccctcctttttgcagctgggttgctgcaagacatttcaccaaaacctcagataactgggtggttcagggcagcctgatacactaaaatatatcaactataaaaaggatgcccagatacgtccacttctacttcagatatcctgaaacaggcagtctgattcatatcaagaatttgttccctatgagacccctctcccactacacctccctgtttcctccattagaatataaatatcttgaagtcactgaccatgttttattcaatgttatgttttctcatctggcacacagtagatgttcatccatatttgttgaataaatgaatgaatgaatgaatgaacagtgctcccgtaacaaaaagtaaaggccagaaactcttgggtcacctggaaccttgttcctacctaccagggaaaagaaaacatgtctcagcattatcagactagccctgagattcactccagttgaattggctgaggttctatggccattcttgatcagtcactggggccaaggcagtgaatcaacttcagaaccatatgggtcccttccaaggagacccagggctgttggagaggggaaagaaaaatatgaatgcagggaggcaccaacatatgtctgatatcattgtactttaatctgtagtttgatcatttaaattgccgtgggtataaggtacctcaaaaataaatttttgtttagttagttcacatacagcatgtattttaaaacaggtgttaaatattaaactgtctttaaagattacacttacaaagctgatctaaaacaccagtaagttatctgctgatatacaacttaaggaaaaaattaattgcatattaaaattaaaaatacaagtttttgttaaggtttacaaaaatacggtgacagacttgagatagaaattcttggtggtgttactgtgacaagtatttccattggtaacctgggaatccatgcccagcactgtggtatatggcgtattttctggaagactagccttggattgaattcacagtctccctggagttgtggttccatttgtcagaaagattcttagggatttagactgaccaggctgtcatgttctcacactcatacatttgtaatttttggaaaaaccataaaacccaccagtctttggagactgtccagaaataaacttgattctaaactggtttggtttggaaaatccttaggctacttgtgttaaaaattaaagaactagctgggcatggtggtgtgtacctgtagttccagctacgcaggaggctgcggcaggaggattgcttgagcccaggagttcgaggctgcagtgttctgtgattgcgtctgtggagcgccaccgcacttcagtctggacaacataatgaaacctcatctcttagaaatgaactggctgatgttaggtacttgccagggtagacgaccttaactaagcccctggggttctgtgagacctctgcaaatagatcttctgcttaactgttcaaaaaggcaagggctgtccccctcaaaaaacaacattgacttctagagacccatggagagatggaagtttctgaagactggcttgctagataggaaaataaccaatgctccagcagtgttcttgggattggaatttgctgattcatgttttttaaaatgcatgatcacatcaaatttgctgagctgttgactatcaacccagcctaaacccaccggctcttaccctttaactttcataaaagagaagcctgattttgttcaggtatctagccttctcccaaagaccctgtgtggcttgaaggatacctttgctggagccatggataggataaatctcgatcagtaaaacaattaggaaatcctgtacttttgcaattggttcggaatgattcgtacatgacaaaggacacacgaggcaatttggaggggctctcattggccaaatctggcaaaatttgagtatcaaaaagataagatggtaccattgaatagaaagagaatcgaactccatagggatttcaaagaaaaagaggttggggagggtgcagagaaaaaaaacaacagcatctttatagaagagtgcccctaaaaaaatgcagaaagagagagtgagaaaagtaccactttgctaccaccaaatgtaataattgattaaggtattttcaccattgagtgggaagttaagaaatgaaacatgtattctcaaagtaccacctcatttaaaaaggagaagaggtacttttacacggataaatctgatgaatacgaccccaaccatgtagtcacaataatgggacaatttaatatgttcttccccatgtcctggatgccactggaagtgcacactgcttgtatgtaatattcttgccaaaatgtttatgctgaatctaatcatggggaagtaagacaaatctggactgtggaacattttattagacaactggtctgaatcttcaaaaatattaatgtcggtcaggcagggtggctcacacctgtaatcccagcattttgggaggccgagttgggcggatcacctgaggtcaggagttcgagactagcctggccaacatggtgaaaccctgtctctactaaaaatacacaaaattagccaggcatgatggtgggtgcctgtgatctccagcttcaggaggccgaagcaggggaatcacttgaacgcgggaggtggaggttgcagtgagccaagattgctccattgtactccagcctgggcaacaagagcgaaactgtctcaaaaaaaaaaaaaaaaagaaaaaaaaaagtcatggccaggcataatgactcacacctgtaatcccagtactttgggaggccaagcggggaggatggcttgatcccaggagtttgagaccagcctgagcagcaagaccctgactctacaaaaaataaaataattagctgggtggggtggcacatgcacgtggtcccagctactcaggaggctgagctgggatgattgcttgagcctggggttgtgccacttgcacttcagtgtaggcaactgagcgagaccctgtctcatttgaaaaaaaaaaaaagtcatgaaagcaagcacaagcagaagactgattgttgagacatgactaccaaatgcaattcataatctgtgattagatcccagattttaaaaaaaaaacctctaaaagacattttgggaataattaggtaaattaagtaaaatttaatatggatttcttattacacactgttattgtatcaatgttaactttcttagatgagataattactttgtggttatctaggaaaatgtctttgtttcccataaatacatgctgaaacactgaaggatgaaatgtcatggtatctacatcttattttcaaatggctcagaaaaaaaattttatagagaaataaagcaaatgtggcaaaatgttgataatgggcaaatctaggtgaagggtgtatgtgtgaacattgtactattttacatttctgtagctgtgatttttataaaagtagaaaaagtaaaagtagcgaaatgatcacaaaacatccacagcgtgaataaaaaaataaataaaactatattatatgaacactgtttaacatttaaagttgtttaactggttttgtaaatgggataaaatattaatcaaagtcccctgagagctattcctaaaatagaataataagatttatgaagggaacttaaaagcttaatggagaactggttttctgaatgtgtcacctccatatattgatatttcaaaaaattagagagtgaaactggttacaatcaacttgtaatggcttgcagagttagtgtcccaagagttagtgcgacagtatgttctgaaggaaacctgagacagtcaagtccaagcaaggtcatcctcagagagaaatgctcctaaaaaaggctgcaaagcaatcacactgaaactgaatgatgtgaaatcacagtggagttccctctaagtgaattctcttatttaatgaatgcttggaatctaaagtaggggcaattgacagtatacacatttgctaaggttgatgcagcacttttcaatgttaacagctactgtatctggtggacgtggccttttatcaccagaaagacctactctgtcctggagaagagttagttctttgggcttttcccttaccctcaggaaaaatctctaagatcatcaaactttctttctgtgatcgtgattcagagccaaataaccttttgattagcaactcactttcccagtgtcttaatgctgggaaacagaatattctaggggaatagagatatataacccacttgcaggaagatgttctgcttggtaaatgaaaccattgacattctgatgtatcagtcccttgcaaatttagtcagaggggtcaccccccacctgaattttatcaatttggaataaacaagattgcctatgtatgatgacttaaacagccccttgttcttgtattttgacatcattttaatttgtacattgtttaaacttaaataactacttagatcccaaacaataccatttcaaggatactgtttcttccttattaaaaaaaaaaaaaaagctcggaggaattatagaaaaaaaattctagtccgggtgcgatgactcacacctataatcccagcagtttgggaggccgaggcaggtggatcacttgaggccagaagtccatgaccagcctggccaacatagcgaaaccctgtctctactaaaaatacaaaaattagccgggcatggtggcacatgcctgtagtcccagccacttgggaggctaaggcatgagaatcactttaacccagggaggcggaggttgcagtgagctgagatcacgccactgcactccagcctgggcgacaaagcaagactctacaattttaaatattacttatcaaccttagagggctggctacaaaccttatgtaaagaagtaaatacatgttagagactcttaaatcccatgaacagctgattgctttttaaaaaatgtacttttaaaacaaaaatgatgtttaaattatgatcaaataaatggtgaatttctttagttcatttaaaactattcaactaaaaacaaatttgtttataatgtagaaatatatgtgtattcgttttcattttttcaactggttataatggagttatgtggatacattctaagcaaattaaaccacactcttaccacattaatctcagagcttatccacatatcagaacactagttttatagtctgactatacttgaaatattcacaaatatttattttgctattaatccttgggtcaaagtttatttttcttgaatgcaatatttgtatttcaaatgttccatcaacatttacaacttttaaagttttcatcataagtctcaaacatcttgctgtttttttttaaatcatgaatgggtattggattttgtgcaatgctttttctggtcttttgagatgttgagatgatgctttttctggctctgtgctttattatatggtgtattatgttaactgataattcagatgttaaaccaaccttgcattcctgggataagttccacatggtaataatatagcattttttttttgtatattgctagattcagtttgctaatattttgctgagaatttttgcatctaacctcatgaggaacattggtctgcaattttcttttgatgtctttggttttagtatcaggttattactggtctcatagtatgagttgggaaatattccttccatctctgttttatgagttcattaaggatggtattaagtattatttaaatgatttatagaatcctccagtgaaaacaactggacctgggattcttttcatgtgggaagacttaaaattacaaattcaacttctttacttggtataggtctattcagaatttatattcttgttgaatcagtattggcaacttttatatttctaggaatttgtccatttcatctaagttgtctagttggttagcataaagttcttcctagtgttctcttacaactctttttgtttctataaggtcaatggtgatgtctcctctttcattatttttggtaatttgtgtcttctcagttttttcttcatcagcctagataaagttttgccaatattttgatcttttcaaagaatcaacttttaattaattgatttttcttattgcttttctgtttcctatttcattgatttcctctctgatctttatgatttccttctttctgatttctttgagtttggttacttttttctagcttattaaggtggaagtttacattatcaatttgagattattcttttctattgaaggtgtgattaaaggtacacatttttcctatatatcctgctttagctgcatcccatatattttgatagtttttttctctgttccattaaaaatattttccaattttgcttgtgcttttttccttggcttatttagaactgtgttgtttaatctctaaatatttttaaattccctaaattttctcatgttgttgatttctcatttaattccattgtggccagaaaataaactttgtaatatttcagtcctctgtttttaaaaattcatttgggcttgcttgatggcctagcttatggcgtgtcctgtagaatgtttcatatgtgcttaaaaagaattctgctgttgttgggtggagtgttctataggtatcagttagatcaagttggttgctagtgttgctctagtcttctatatccctgctgtttttctgtctagttgtttttatcaaatattgagagtgaaatattgaaatctgtaactatttaccatttttgttgctcttcatttcttctcatagattggagttactctttggaacatttccttgttctagagcttcattctctccttccttttttgtgttattatagttatctacgtcacatctttatattttataagctcaacaatagttttataattatttcatatagttgcattttcaattaagaaaaaaaccagtctgggtccaatgattcacacccttaatcctagcactttgggaagccaaaggaggaggatcacttgaggccaggaatttgagacatgatgagacactgtctctacagacatttttttaaaagttagctaggtggggtggtgcatgcctagctactcgggagattgaagtgggaggatggcttgagcccaggagtttgaggttgcaagtgagctatgatcacaccactgtactgcagcctgggtgacataataagatctatatctaaaacaaaaaaaaaagaaaaaaagaaaaaagaaagatatttatactgtcttttattgttacatatatttaatacttacaaaaactacctttgagactgctctgtttctttatgtgaacttgagttatcatctgctgtcattttccttcatcctcaaggattcctttagtatttcttgtaaggcaagtcagctaggaacacattatctcggttttttttgtttgtttagttttttggaatatctttatttggcctttatttccaaagaagagctttgctgaatatagaattctaggttgacaggttcttcttttttcctttagttcttacaatatgtcatcctattgtcttctggccttcactctgatgaaaattcagttgttaacataattgtgggttcccttgtatataatgagttatttttgtcttgatacttccatgattttctctttgtctttggcagaacccagtgaagatgaaaatgtgaagtccctttgttcagaaattaagagtttcaaagtagtgatgggaaaggcagccctgatctttggctttcaacaattttactatgacttatccatgatatgtcagtggttattctgtttggaattagttgagctgcttgaatgtgtagattaggtttttcatcaaattgagaagtttggggcattatttcttcaaatattttctctgcacctttcttctcattctggtactctcattatacacatggtatccttcaggtctgtgaagctctgttcattttgttattctttttcttctgttctttagattgaatctacttccaagttcatagattcttcttctgctatctcaaacctattgaacccctctaataaatttttcattccaattactgtacttttcaacttcagaatttccatttggttctttttaataatttctctcttttcatcagtattctctatttgatgaaatattgttgtcatcctttcatttaattatttaaacattattttctttagttatttgaatgtatttagtctttgtctagtaaatcaaacatctggcccccctcagaggtggtctctattgagtgcttccatcctccccttccactgtgtatgagttatacttactgtttcgtagcatatcataattgttgaaaactgaacattttagataatgtgctataccaagtttgaattctggtccccctcaactgcaggttgttctgatttctgttttgcttgtttgtttagcgatttgcatgaactaattctgtggaatctggctccctcacaacatgcagcagctaatgtttctgctcagttaatattattattgtcgttatcattgttttcacttcatgcctaatttcctaagggttaccctgggccatcatagcttactggtcagccagtgagtggtcagaagttgtgcttaaaacatcttgatctaataaagcttctactttttaactgacagatttgtgtttaggtgaagatcacatgcagtgtacaggcagtttacaagtctaccctgcttttattttttttattttattatttttttgagacggagtctcactctgtcgcccaggctgaagtgcagtggcatggtctcggctcactgcaaccttcacttcccagattcaagtgatcctcctgcctcagcctcctgagtagctgggattaccggtgcatgccaccacgactgagctattttttttgtatttttagtagaaacggggtgtcaccatgttggccaggctggtctcaagctcctgacctcaaatgatcctcctgccttggcctcccaaaatgctagaattacaggcatgagccaccatcccgggccaagtctacgctgattttagtatctgtatcataaagcctcatattcagtcagctacatagctagctaaagccatctctggcctctcctgagcatatgcacaattatgcatatgcaggcagtcttccagacccccagggatatgtgagagcttatcagtgcctactgtggctgtctcagtccccagatcacactgttaaatttctggttggtctgctggtatgttgtttaccctaaacagtgttgcaacctcaggctagctgcaatactggacttccctgattgtttaccactgagatccctattgtttttgacagtgctcctgggcataggtttttttcaagctctggtacaaatgaacgcagccccttctgccagctacctcccatgacctgctctgtcctggtagaactaccacacgatgaagctatgggaaaagggtagataggaacagccccggggtaaaacaccacagacctccactgagcttactaaagtttagtgattttttttcaaaataatttcctttcaagttgttgtatgactttggtcaatttacagtgtactgacatggttgtttttgataattttgtcaaattttatcattgctttttggggaaaggatttgccatgcttcttcctcaggcattctggcaatccttccgtattttttgtaagtggtttctataggggtgcaatagacattcttaacttttcacagtaactttaatgttgtttccactttatgcaaaatgtagaaaccttgtaatagaatatatagattcatttaccacaactcatggtaaacacttcccctgtctcctgttcttttttttttcaactcccagtcagtgaatagatctgctcttctttatgccttagttactgtatatctacctacaggtttcaggatttggattaagtaatgattgggccctctttcattcaaaaaatacaaatgctttgaagagagaaaaaactataacaaaaactctacatgtgttctgcatctttacatgtgttctcatctctttatgtgttcaatatgtatagtacatgtctcatggtttagaattcttgaaagaggaaagaaagcctttatgttttagggactagttactaaaagaatggctgtaattcttttactgtataaaaggtgcaaatggttatttggggcaaaggtattatgtgcagagtgagtgatctgtgaacgcttgcaatacctttacccttgtgcaatcactcagaactgaacttacatatcttttacacaggagagaattggcatccaccaatgttttgctactattgatcccaatcactaaaatctcttagaaatttcaggaaatggtatattttccatcccttactattctagtttaaagcattaagattggggaaaatcttttacacctttgtttctggtttttttttcctttggaatataatttatttacttttcaatgctatcttttaggatatattttttctcttgtcctaaaattatctcttggtggagggcactgttaactttttgctttgtgtgtgtgtaggctcatgttatgctatgtgtatgctattttatgctatgtgcctggttataacacatttatctattttggaaagttaatttttagcaatcagagaacatgtttatctcacttgccaagaatagatactttacgtttctgttgcatttcttgtctgcagtgtttctcatctcttcccaattcttttaaatcttaaccacgcttgagaacccagcttgaatcacggctggttccaggactcttccccggctcttccacctggaaatggtcttttcctccttccttcatttatttcgcaaataaatattgagtgcccactctttgtaagacactgattaggtaatagaagctatgtaaaagttgtgacaaataattttgcactggtagatatgtgtttctatgcagtcatgcactgtataacaatgtttcagttaacctaggtttgtataagtatactctatgatgtttgcacaacagtgaagtcacgtaatgatgcacttctcagaacatattcccatcgtgcagagatgcacaagtatatcatattttctcggttaaattgtgatttacttgggggtacatccttctccttattgtttcttgtattccttataaaatttagcagggtgacttctacatagtaagggttcaagaaaaagctgaatttatatgattatatttgtaaattttctttaaatatacttaggtatgcaagacacaaatagttcttttctttttttcttttgagacagagtcttgctctgttgcccaggctggagtgcagtggtgcgatcttggctcactggttaaagcaattctcctgcctcagcctcccaagtagctgggattacaggcacgcgccaccatgcccaactaatgtttgtattcttagtagatacggggtttcaccatgttggccgggctggtctcaaactcatggccaccttggcctcccaaagtgctgggcttacaggtatgagccatcactcctggcctaggactgagttatttgaatgcaaatcaggaaatggcacatcggaatttattatttattttattttattttattattttctagagatgggggtctctctatgttgcccaggctggcctcaactcctagcctcaagtgatactcatcacatcagaatttagggtacaaatatagtccataacaattggaaattttagtccagtcacctcattttccaacgctatgataaacatccttgtgaatgctgttctcctggtctagaaggctcttctcagccttctgtgtgtctaaggcccaccattcttcattgtcaggttccaccacttccagaagacaataacctgtcttccccaaccatttcagtccatacgggtgccatctccctctgaactactgtagcacttaccacctagttcagcaaccagatttccccagcaactctttctatgtggaattcttgtctattctacgggatatggaccacattatatatatacttctctttatgcctgtgtgtcaaatacattactgattaaagcttggttttaaagtccaaatgtggtcatattggtgaactgctataaaccttgcagaggcattagtaaaataaaggacttcttttggtacaaattagatgtgtgacaggctgcttttaacagagtattggcttcacacaactttaagtagtgattttaccagaaatgtttacattaaacagcctttttagaaagtaaactgttacaactatcttgtaaagtaacctaacaatatgtatcaagaatcttaaaacttttcataccttttagtgcacctattttggggagtttaacttaaggaaacaatcctaaagcagaaaaataaaaagctttgtatgtaaacatgtttataataggatatcagtaatattgttgttcccaaaaaagtgaatgagcaaatacattatatatacgtatacatacacacacaatattttatatgctgattgtttccacttgtatttccctgtgttgatacaaattttactaactacatttttactagatatgtaatattctctcatgtatatataaaattatatgttttatataacatgtataatttaaatttaaatatataatataaatttataatttatatatagttatataatatatatttttatatatgtatgagagaatatgtatctagtaaaaatatagttggtaaaatttgtatcaacacagggaaatacaataagtggaaacaatcagcatataaaattgtatatatgacatagtcaaaatgatacacaaaaatatgagtagaaagaagaaatgagagggaatataccaaaatgctaagatgagttttagtgcctggattgccatttagatttttgtctttttctttctactttttttctgttttccaaatcatcaaaattgggcataatttctgaataaaaaagaatataatttcaaatatggaggaggcatcaaggatttaaatttcaagtagacagtttttagagtttaaacattttagtgatttcgtgtctgaagtatgtgattgtccaaattgttggatcttccccacccccgcccctgcccccaaccccgccaagtgccgtcaggtctggcgagtgtctaaccacttggtggccagtttaaatctttcccacaaactttctagtttatgttgtcccatgagccctggggcagtttggatttttgcagaactgagaataagctatgaatgaaaagaagaaaatgggattatagattcctttcctccactttatggccagaatactaggtagctcaggaagttctgaatcagtcctttttctaggcaaaggcagaaatcctgggcttgggttcttcaaggtaggctaatcagggtgtcagagatttttggtgtccttttaacatccaggaattacagataaggtaaatcaagccacgaacacataggtactcaggcagcgattggacaaatttatgctctactacagcagatacattttgccaatgctggaataaattggcaaggtactaaggtttacctctgtttaaaattcctgcttgggaatatctaccttagaataactgttcattttaatcaggttaaagggcaccaaggaacaattctaacaaacagaatcagataatactagtaaaaagggaaagagaatatcctgagaaacagaactgaaacttaagtgataggaggaaaatgaaacgaaactgaaacttagccagcaaagctatttaaaaaaaaaaaaagtctcgatcttaacagagacctagcaggtaactatatatgagccagtattatcaaaagtaaaaccaataaatgttgtacattttcctacgttacacttgaaagaaactcttaaccagcagtgtgagctgcatgaccttgctgcagccactgacgttctctgagtctcagtttactcatctgtgaaaataggtgtaacagtacatgccagcctcaattaaatacagaacttcagggcttgagggggtcttggaggtcatcagatcttggctcctccactggaccagggccttggggctaccatgcttaccttgttggtgtaagtgagctctcgcagcagccagacatactgcagagcccattgtgggtgcaggcaaactgactcccaggtcatgtgcaagaggccatgagagaagacaggaggatattcaaccaatctggcttcagaaggaggctctgtgaggacagctgagtggcccaaggtggctcagacagggtacaagcaatcgtcatcctcagagtgggactccatagtgtgataaagcagccatggagcggggacaggagacagggacgggacaccaccagggcaggggacccatgcagacaggaccctgagctcagaagggccctaaatgttctgccaacaccttcttgatattttttcttttcttttttttttttttgagaaaaggtttcactctgatgcccaggctggagtacaatggtgcaaatacagctcactgccacctcaacctccagtagtcctcccacctcaacttctttagtagctgggaccacaggcgtgccccaccacgcttggctaagttgtttcttctcttctttgtagagatagggcctcactgtgttgcccggcctggtctcaaactcctgagctcaagcgaacctcccaccctggcctcccagtatgctgggattacagatgtgagccactgtcctggcgtcatggtgaaattcttaattttgttaagagacatccccacaatttcatttcatacaggctctgcaaattatgtagccagtgcagggtacaacatccaagatctgctgaacagagggctggaggggaggggttgtgacacagggtgatcagaaactgctctgggatgtgtgacacttcccaagcctcaataaacggtagaatgggaatagactgcttcctggcccctcaggactggcttagccatgaaggactaacctggatgttcttggggactgtggttgattcccatggaggcagctccacagaggtcctgggctcaagtgtggtacctgagagagggtcaagagtctggtggttgttgtcattttaaaatttattctattttattgatgtaaagttcactcaacataaaattaactaaaacctgaaggtagctttttacaatattttaaatagttttgtgcacgaaacaaagtttgtgataagtatttttgtgtggaatttaccacttgtggcatcatatcagcattcaaaaagtttcagattttgatgatgagtcgaaaatgcatttaatacacctaacctaccaagcatcagagcttagcctagcctgccttaaaccatgctaagaacatttacattagtctacagacgggcagaatcttctgtaacacagttgatgtagtttggatatttgtcctctccaaacctcatgttgaaattggccaggcacagtcgttcatgcctgtaatcccaccactttgggaggccgaggcgggcggatcacgaggtcaggagttcgagaccagcctgaccaacatggggaaacctcgtctctgctaaaaatacaaaaattagctgggcatggtggcacgcgcctggaatcccagctactcaggaggctgaggcaggagaatcgcttgaacccgggaggcggaggttgcagcactccagcctgggaacagagtgagactccgtctcaaaaaaataattattaaaaaaaaaaaaaaaaaaaagagggagaaatttgaccctgtgttggaggcggggcctggtgagaggcgtttgggtggaggtggggcctggtgagaggtgtttgggtcagggaggtgggtccctcatgaatggcttgggtcctgtccttgtcctcacagtaatgactgagttccttttctaccggttcctgcaaccagacggagtttcgcttttggcgcccaggctggagtgcggtgggcaatctcggctcactgcaatctccgatttccggtttcaggcgattctcctgcctcagcctcccgagtagctgggattacaggcgcccaccaccatgccccgctaatttttgtatttttagtagaaacagggtttcaccatgttcaccaagctggtctcaaactgctgacctcgtgatccgcccgcctcggcctcccaaagtgctgggattacaggcgtgagccactgcgcccggcctcttgcaacatttgactgttaaaaagagcctgacacctccttccctccctcctcctcccactctagccaagcgatgctttatctccttccccttccgctatgatcacaagtttcctgaggtcctcatcagaagcagatgttggcagcgggcttcttgtgtaccctgcagaattgtgagccaaataaatctcttttctttataatttttttttaaaggccggatgtggtggctcacgcctgtaatcccagcactttgagaggccgaggcaggcggatcacgaggtcaggagtttcagaccagactggccaacatggtaaaaccccgtctctactaaaaatacaaaaattagctgggcgtggtggcgggcgcctctagtcccagctactctggaggctgaggcaggaaaatcccttgaaactggaaggcagaggttgcggtgagtcgagatcgcaccactgcactccaacctgggcgaaaaagcgaaactccatcccccccaccccccaaaaaagtttcagagtttggagcatttcagattttagattttcggattagggatgttcaactgtgtagaattcagttgtatttggtgcgttcactgtactgcgcaacaatccgctgtagcttgctccaaagcatttgtgtgacctgaaaggaaatcctgtacccatgaagcactcactccccactcccctcctctcttcaatccctgccaacagctaaagtatttttgtctctgtgggatttacctcttcccaatatgccatacaaatgcaatcctacaatcaatgacatttggtgtctgtcgtctcacttctcatactgtttttgagttcatccccatggtagaatgaagcatgtagcattgcggtattatggctgaattatatcccatggtaggtgcctaccacgttttatttatctgttgacgggcatgtgggttgctttgccttttggctattgtgaatggtggtgctatgcatattactgtacaattatttgagtacctgttttccggttttttgaggtatatacccaggatgttaaatcgtatgataattctgtatacctttttgaggaactaccaaactgttttccacaagggctacatcacttcacaatggttctaacttctcaatatcctcgccaatacttgttactttctgttattttcatttttattttttggacggagtctcgctctgtcgcccaggctggagtgcagtggcgcgatctcagctcattgcaagctccgcctcctgggttcacgccattctcctgcctcagcctcccgagtacctgggactacaggcacctgccaccacgcctggctaattttttgtatttttaggagagacagggtttcaccttgttagccaggatggtcttgatttcctgacctcgtgatccactggcctcggcctcccaaagtgctgggattacaggcgtgaaccaccgcgcccagcccctattttctgtttccctccccccacccaactgtagccatcctcctcatgtgtatgaagtgtattttattgtggttttgatttgcatttccctaatgactaatggtgttgtatcttttcatgtgcttgttggtcatttatatatctcctttggagaaatgtccattcaagtcctttgcttatttttgaatttgattgtgttttttatcattgagtttttttttttttttccttagatggagtttcactcttgttgtccaggctggagtagtgcaatggcgcgatctcagctcgctgcaacctcctcctcccaggttcaagtgattgtccggcctcagcctcctgagtagctgagattacaggcatgcaccaccacgccccgctaattttgtatttttagtagagacggggtttctccatgttggtcaggctggtctcaaactcctgaccccaggtgatccgcctgcctcgacctcccagagtgctgggattacaggcatgagccatcgcacccagcctttatcattgagttctaagagttctttatatattctggttacaagtccctttatatgatatatgatttgcaaatattttctcccattgttttaggtcatcttttgttgacagtgtcctttgatgcacagttttaaatttttatgagtcccatttattttttcttttgtcacttgtacctttgtgttatttctaataattcattgccaaatccaaggtcatgaagatttacccctatgttttcttacaagagttgtatagttgtagcttctaaatataggtctttgatccattctgagttaattcttgtgtaagctgtaaaataggggtccaccttcattcttttgcatgtgaatatccagttatcccagcataatttgttgaatgactatttttccccattttattgtcttggcacccttgtcaactagctataggtatatgggtttatttctgggctccaaattctattccattaatctatatatcttgtcattttgaatcagtatggataggaatgtgtcacaatgggctgtagtctaccttgcacagaggcatggtaagtgacatgtcaatacatcctggccaaaggtcagatacatagggtttggtaaatttgataagaagagtggagctatgaacattaagcacaaaaactgcaaacatataatatatactgagacaacagcccagaaaattttttaagaactcaaaataaatccataaagagagacagcctatgcaaccttacttgccagacctgtcctagaagcaatggtttgtattatcttggtggatgaactccttctacaaatacaagtcaaacattttgaggatgggcagatccatcaagtccattgtaaacaactgagaacatggtgctccacatgctaaaaccaggaagaaatttgaatgcacttgcttgaagccatttcaaatcatctttctgttttcagtttttgcaatataacaatttgctttttttttttttttaagatggagtcttgctctgtcacctaggctgaagtgtggtggcatgatctcagctcactgcaacctccacctcccaggtttaagtgagtctcccgcctcagtttcccaagtagctgggattacagatgcgcgccaccacacctggctaatttttgtatttttagtagagatgtggtttcatcatgttggccaggctggtctcaaactcctaagctcaagtgatccacccacctcagcttcccaaagtgctgaaattacaggtatgagccactgcacccagccaacaatttgctttgatctctctttagacaatgtggccaaactttcttggagtaaatttagtgcacgtaaattcaataaaattgtttaataatgtaatattttaaattaaccattaattattaattatccatatttttatgtatgcatatattatttaggtaattataacacatgccctctgtcacacacatgtcctgggcactagagtggtgacagatacagtttctgccttcctgaagctgctgggtccttcatcgaccttgtataagggctaggtagcagaggttacaaaatatccctgtggctccacctgccatggttcttttggctctgtcctgagtccctgggctctggactccccagctggccaagcccacaaacctacattccccttagcctcccaggtcagccaagacatacaggagctttttgtatgaaattttactaggatgctaagggaaatcacaaaagaagaaaacaccagagcagagaaatagatcagtttactgagtacagatgatttatcccaagggaacaagagttcctcatttcagtactaccacgaaaacctttccctaagcctcagtcttccacacactgccgtcaacactcctggagcacttctttctttggctgccgactcttaagaagctctgcaagggagggataacacctttgcagggacctaatgggctattgtggttaggttccagaaccttcagactttctctagggataattcactgatgaaaacaagcactgccagccccaagcttaccctaacctttgcagggacgtggggcagaagtacaaagggatgcccacataccatctgtataaatatttaaaagttattcctcaagctaacaaaccattaaatagcatgtccttgctaaatacaacttcatcctgacacagagagcaggttccaactgagaattccctgtcccatctgcagcctgccccccgactcccacctttcttgccttactccacgaggggccattgtgtgcagacctccagccaccagggccaggttttgtattatttcttgcaactgcatgtgaatctacaattatcccagtgaaagtttagataaagaggaaggaagaagggggaaggaggaggaggggtggagagagagagagagagagacagagagagcgagcgagctgtgcagtgtgacctatagacccaaagtcactgtgcctgataggctctttgtttgagagcctggcctggtccccctcagcccgccccctcctcacagagcaaggagcccacaggccagtggcttttgccaagcactcgcttagtccacagtcttgccgaaatggcctccagcacgcttctagggcctgcgagggccttctccttgtgtccgactcccgagtgggtcttgctgcactgccggtgtgtgcacctctgggcccaagaaggccagcaggtagctgtttgtcggaatcatgaacagatcttgatctgggaaatgaagacctggaatgtcggtaaccctgcgtggcagtgatcccgttggggaaggaggagaggaacactgcttttcttccttcttttagccataagattctggaaaggagaaccagaggaaggcagagccaccccctggtacagtccctgaactctagtgaatggggcatggttcatgaaatacattagaggcaaagatcaaccactctgcttcaattaaccacatgcaattgtgacatcaaacaaaaacgtcagacgccattccaaagattaaattgtataaatctgaaataaagcaagatatgcttcattatttcactctttaaaccatgagctatttgtccctctttgcaaagaagggccattgattttggcagccaccacccaacagttcaaagtataggacatctgaccaggaggccacagtggagagaagctgttccttgtttcaagtgctgtcagatatgagggtgtcctggtgtgagcaacaacctcattctctgaggataaagtgaatcaagacctgagctgttatgggacaggaggaaataggacatagcaggtagctggtcttagggtgccgtttagaagacatttctggatgtttaatattcgtaatggaatcacttatcaataaccaagtgttgaatattttcaagttctgaacatttctttttctattccagtctaatttgtatttcacagcaaacttttggaattaccatcttaggtatttccttaggtgctgcctagttccgctcccagaaggatttgaagcagcttatctctctctaaggttaatgtctttggtccctaaaactcttcaaaatgcatttggttttatattagccaaaatttctcttgggaaattgtcagagaaataaataactgaggagagagagacatagccacactagggatcttgtgtttgtgtgccctgaaaacatatttctgctggtggctgtgctggaggaaagggcaaacacttttatatatatatatatgtacactatatatatttttaaattcgagacagggtctctgtcacccaggctggagtacagtggtgtgatctcagctcacttcagccttgacctcccaggctcaagcaatcctacctcaacctcccaagtagctgagtagctgggtctacaagaggtgtgcaccaccacactggctaattttcaaaatatttaaaaagtcctttttttttttttttttttttttgagacagagtctcagtcagtctcccaggctggagaacagtgacacgatctcagctgactgcaacctccgccttctgggttcatgccattctcctgcctcagcttcccgagtagctgagactacaggcgcccgccaccatgtccagctaattttttgtatttttagtagagaccgggtttcaccgtgttagccaggatggtctccatctcctgacctcgtgatttgcccgcctcagcctcccgaagtgctgggattataggcgtgagccaccgcgcccagcctaaaaagtcatttctaagggattgttttggagaacagggcctggcacacagagttgcttgagaagcagagccgatctcctgaccagtgtgcctcacgcctgtgacaggttaggagtggctgctgtcctctggcagggtgctgccttctgagacaaatattatcatttgctgtgcaagctgtgttggaaatcaccacgtccatctccagccccatctccacttctcactctggaccttcccatgagctccttgagggcagggcagacagcccatttgtatttatgtccttagaccaacgcatcatgccccacatctggtaggtgctgaataaacgttgagcagaatttacaagcacgctttttatagcttcctccaagtcatctgttagagtgttgagcaataaaacatcaaggacggaactattgatcctccaggtgccaggctgacaataatttattaatccatattggaggtatgttaagtctaaaaagggagaagtctttggagggacatgacagttttttcagacacttgaaagcttgtcccaggggcaagctaagaaccaatgggtgaaaaatacagaaaagataaagttctcccaagaacaatatcatgggtgagggcttggggaaaggggcattctcatgatggaaaatggaatatattgccaaatttggttccacaaaaataaaaattccattctatttttctggaacggaatttggcaatatgtacaaaaaaccttaaatatatgcagaaattttgaccgaggaattccacttctagattttggttatagaagtttgatcagctgcacaaagatctatgtacaaagatgttcaacacagtactggttatgatagtgtaataattagagccatgtaaacttttgacaataagggcttaaataaatcatgatatattcattcaatggaatgccatacattattaaaatggtgatttggaactatgtttgtttgaatgaaaatatgtttgtactctatgggggaaatagaaacaagtaggatataaatggttccattttattatatacacacacacacacacggagatggagagagatggagagacagacacagagaaagtcttgaagcttatatatcaaaatgctattgtgttattggtgattatctttctgcgtgttgggaatacaactgatttcacatttatttgtatccattatttctaaatttttcaactatagatatatgatgtaataacatatggtgtaataataatcatcatcatcatcataaaaaattaggactgatgaatatgtgcccccactgaaatggtgagctttcttctacccaaagtgctcagccagaggccagatggttacttggttggatattgtggaggaaagttggaagagtggagtttaaagccacttccaactgtaaatgctatgatccatgaaggaagaaggtgacactggaaaatgtgccacagatcctcacgcagtttgtctggcagatagggtaattatttgcaaggcttttctgttgttgatgaagatgtctattttattttaattttttgagacagggtcttgctctgaatcccaggctggagtgcagcagcatgttcttagttcactgtagccttgagcctcctcctgggctcaagtgatcctcccacctcagccttccgagtagatggaactatagctgccaccatgcctggctaacttttttattttttatagagatgggggttttgctatgttgcccaggctggtcttgaactcctggtcttatacaatcttcccacctcgacctctcaaagtgttgggattacaagtgtgtctggcctgagaatgtctttaaaaattggaaattatgttcttaatattggcctcgttctgtgacttcttagtgagcaataacctaggaattggaatatcctcatgctgttccctggccttacaaactgaaatatttgcctctcaccccactgggtacaacatgagctccccacagccagggatttttgtttcttttgttctagatcccagaagagtggttggcacacagcaggcactcaataaatattttttgaatgaataaattaatgttggcagagtaaaataagcaacttggaagacagctgctatgcaaataaatgctttcgctgtgttcatgctaattacttcaaaaacatgagtttggaaacagaattccaaaactaaaactcattttgtcatgtaattaatttttcaaatgattaacattctttaaaaatcaagtatgatgtttatatggccatacagtttaaaaatgagaactccgcattgtgttctagataaccaccggtcaacagcgctttctctaacgatagaaatattctatatctgcactgtctggtacggtagccactagccacattaggctattgagcagttgaaatgtggctggtgagaatgaggagctggtttctacattttatttacttttaattaatttaaatttaaacttgaatagccatatgtggctagtggctactgtatcagacagtgcagttttagatcaaacttctcttagtttatatgacaaggtagataccatgtgcttaccaagataccatatataagcatgaaaccatgggtacaatctagactgaatcttgtactgagagaaagagatggaaatgagtccaagacttttatatgcttcgtatgcatggcagcagagtgacgtcatagattaaaacaatttctttaccacacagccttcctaatctccagtagtcctgctaaactctcaacattccacagaattatttgtatccaaaaataaggtttataaaagttgcaaatccaaagcaattatctgtagtgcatactgtcagcgtcagaatgaaaagtgcaatttgccagaaaagtattattgttattctagggtgccctttttattagttgactattgtacaatactgccttcataatgttagttaaaagtttttgtttttgcttaaacatcacctttgatgttgttatctctaaagcagataacagcattgaggaattaagtgaatgctaattcaactaagccaaccattcagaagaaccaccctgctgtcctcctcaaaagccttcataggctgggcatggtggctcatgcctatcagcgatttaagaggccaagggaggaggatcacttgagcccaggagtttgagaccagcatgggcaataaagtgagaccccgtctctacaaaaactccaaaacttaactgggcatggtggcacgcacctgtgatcccagctacatggggggctgaggtaggaggatttcttgaccctgggggtcaaggctgcagtgagtggcatttacgccactgcactccagcctggacaacagagtgagaccctgtctcaaaaatgaataaataaaaataaaataaaatataaataacctttataaacatgtgatgtgttctccttgaaattaactgagtatttatcttaattcttcatcttactgatgtacagtagtccccccttatccttgggggacacattccaagacccccagtggatgcctgaaaccatagctagtatcaaatcctagatatgttttttcctatgcctacatacctatgataaaagtttaatttacaaattaggcacaatgagattaacaataaccaataatagaacaattataacaacacactgtaataaaggttatgtgaatatggtttctctctctctgtaagtattttactgtacagtcctcacgcttctttttggaatgatgggagatgagaaaatgcctatgtgatgagatgaattgaggtgaatggcacaggctttgtgacctagggttaggctaccatcgacctgccgacgacacttcaggaggatcatctgcattgggtgatcctggatcatgcagccatgacaatataggtggtgtccagtcatgacattcaggcaggaacagacagtggtgttgatgactagccagctaaccggcaggtagcgaagatagtgcagatacactggcaggagcaattcacatcacatcctgggcaggacggagtaggatgagatttcatcatgctactcagaatggtgcacaatttaaaactcatgaggtgtttgtctccagatcattccatgtaatattttcagattgcggttgactggggataacggcaacctcagaaagtgaaaccacagataagtgtggactactgtataactgtcctatggccatttgtagtgacttcgatgttgctgcaggtgaaagaacacactgcaattaaggagaaaggcaaaaatggaggcaaacgcagttaaaatgaatatatttttgtttttaaatttactaagcattataagcagatggggtgggggtggagagaccgaatcacttccgagagcagcaggctggccaaagaaggaactcccagtgctggtggggacagaggacagccatgcacccagtgggtgggcacctacaaacatgctgtccccagggcgtgctgcatggaggtatccatgggggtcgatgtaggaggaggctcttctgctgttcctggaagggccaggatctctgagtctctggcacattctcaccacagctaataaatgcctcgaatgccccaccttgggtgacggggtgtgccctgaggtcgcaatgccctactccctgctctggacaccgggaacacaacgatacccacagacaagtgcctagtgaatacggagagtgtgtgaatggtgcttgactcttcatacaaaagaacaggaagctggggcacagatgacacaaaacactgtccgtcaaacatcaccactacccgcttctacaacaccttgtgtgattcctgacgctattcgccttcatccatttaccttcttgtttctcacatgttttccctgtattctgttggaagagtgtgatccaggtgctggggtatgaggtgggggtaatgttgccaacttgagattaaacagatcatcagctcaaaaaataaataaataaatgaaagaattataagctgttgttagaaaggtgcaatcatagccggggtggtggcacaggcctgcagtcccacctacttgggaggcttaggcgggacctggggagatcaagcctgcaatgagccgtgatcaggccactgcactccagcttgggtgacagagtgagaccctgactcaaagaaagaaaaagaaagaaggaaagaaagaaaaagaaaagtgagatcagaaaacggtttggctgttttcccatcactaccttcaaatgcgtgttgtcaggtctcccttctgggaatctgaatgccttggaggtcacctctgagcattttggatcctttatttcagtttgcaaactgtcactaattcctgtatttcagatttaattcttcatctccaatctcactgctacctccagagtcgaggactttgattttggattatagatattctgtcttggaagctcaaagatctgccagcattcctgctacaggagaatgttcctgaaataatgctgtgctcattccctccacaattagcggatgtggagtgaatgtcacccttttggcccagggaccatcatgtcttcaactgcttattgcaacaggtctcagttagatctgcacactgtgaggtcagaacaaatggaaggttgtctttcttgcgaatcaagggtgtactgcaaactgacctgttccctgaggcaagtcacctgcttcccaggcctcagcttcctcatctctaaaatatgagatgagactgaatcgtttttttaagttctcttccagctttgattttgaaattattttcaggtcaatgacctaatttttaaggtctttcattgtttcatccagttctttctaatcaaaagtatctcccatttctcctcagtatgtagattttcagatctgtctttgcttccctttctcatcctagctcaaatcacagctccttggtcactccagctcatggtgattctccctgtgtaattgtctctgttcccaacttacaataaacaccttgataacatatatcatattttatgatttggccatatggttttatagtttctagcccaatttttattactaggaagagctgtccaatgaatacctgatggctgattgttaattataatgtgtactagtcagggttctccagagggagtttattagggagaaatggctcacatgattacaaggcaaagtcccacaacaggccatctgcaagctggggaaagagagaaactggtagtggagtccaagtttgaaagtttcagaaccagggaagccaacagtgcagccttcagtctgtggctgaaggcccgagataccctgggatgccactagtgcaagtaccagaatccaaaggcagaagaacctggagtctgatgtccaagggcaggaggagtggaagcaagggtctggtacaggaagaaagagagagccagaagatgcagcaagcaaacgtatcctcccttcctccccgtgctttgttctagctgtgctggccactgattggatggcatccaccctcattgagggtgggccctcctctcctagcccacccaccataatgtcaatctcctctggcaacaccctcacagacacacccagaaacaatactagccatctaggcattcctcagtccactcaagttgacacctaatattaaccatcacataatgtataaaagttagcatgacattcatttttctacacaataaaagtctattgagaaccaattatgagtcaggcattgtcataggcatgagggaacatttgtgaccaaaacacaccacctctcctgcccatctgaagcccacattccgggtcactttttcctgtccttttgaggccagaaatgcatattgtaatgtataatgtaaatgtatgttgtttatattgttcccaggttatgcaatgtctttagaatctatatgccgtgctgctgttgtaaagctgtgtggatgcctctgaacaggtccatgcaccaaggtccccagtgatgggggtccattgcagtaggcagccgtgtcctggtggcagtctggcagatgcctttagtgaattaaaatttcttgtaatttcagttaatcatttgctgttatttctccacatgccgtagtgtgccttatcagtggaaattgtatctttacagcagtagttctcatactttttgaactcaggacctctctatactcttaaaaattattattggaactccaaagaggtttggtttgtgtgaattatagctgtgtagttaccctatcaaaaatttttgaaaatgttgattaaatcatttcaaagcaatactaaatcatgcatgaacatgaataaaagactcatccatttatgtatgttaacgtaaattacatatttttatgaaaaatagcgttttcatttgttgttctgctttccaaaacaaaacacatttggtgagaaaactggcattattttatatttttataggtctctttaatatgaagcttagcatctatttgacagctggattctcatatcttctgtgttcgatctgttataatacgttttttgtggagtttttttttgtttttttttttttttttggagacagagtctcactctgtcgctcaggctggagtgcagtggtgcgatcttggctcaactgcaacctctgcctcccagcttcaagcaattctcctacctcagcctcccgagtagctgagttttaatttaattacgtgaaaaaaaatctgaccttgtacagatatgagtttggaaaagaggggagaattgtcacagcctttcttatagttgtgaatattatttgaaacctcaccaaaagtagactagtagcagtttcttaagtttagttgcaatgtggaatctataaaactgtatgagtgaaatttccccaattagttacattaatccgtatattttgcaatttgaaaggatcttttatccatgttcatgcattattttataacatcatgcatggactgtttggaaaatattcgttcactgagttgtggggatcgtctaaatattgactcattttattatacaatatcaaaactacatccattcacatcaccactgatctcacctgcaaaatctttaagtattgcgaagctctcaaactcatgatgcctgatacaagacttgcaaaaatctaatttttgcttaaaatctcaaaagaagcaaatctatcagttgtttttccttagagtgacaaacttacttggctcatttccagaaaatgtctaccaaacagccaagtctgaataaccctagttgccattctttcaagtaaaaggagcgttccatatagaaagcagttagttcaccttgcaagtcaaactacaagtgcttttccttgagattaaccgtggtagttggatacccagctgaagtgctttatgtataatttctgtttaatcacacagaacactcaaggacatgtgcttaaaggtcaagacttaataaaattaatagttccgctgggtgcggtggctcatgcctgtaatcccagcactttgggaggccaaggtgggcggatcacctgaggtcaggagtttgagaccagcctgaccaacatagcaaaaccctgtctctactaaaaatacaaaaattagccaggtgtggtggtgcatgcctgtaatcctaggtactcgggaagctgagacaggaaaattgctcgaacccaggaggcagaggttgtagtgagctgagatcacgccactgcactccagcctgggcagcagaccaagactccgcctcaaaaaaaaaaaaaaaaaaaaaagcttatattgctttatcaaggacattttaatgtaaaacttgcttaggacaaaacccatcgtggatgccagtgaagaataccatgactaatggtaaccatcggacaccactgtcctgattcatgctaaggcagctgtagttgtatcccccattgctatcgaaacatcattacaaatggcaacacagtgaaaaaggcaaataacatcttagtatttttatgatcataatcttgactttgcagaccctctgaaagagccttggagacccccaggggcccatagcatcacactttgagaactactgctttagaatctgttaggggctgaattatgttccccctaaatttatatcttgaagctctagccttcaataatacccagaatgtgactgtggtcggaggtagggcttttaaagagttgactaaattaaaatgaggccattagggcaggcacaagtccaatttgactggtgtccttataaggaaaacagattaggacaccaagagaggcactagggatgcccgtgcagaggaaggaccatgggcagaggctgcaagagggaagccagctgggagccaaggagagaggcttcaagggaaaccaccctgccagcaccgtgattgtggacttccagcctccagaactgtgggaaaacaagtgtgctgtttaagccaacctgtgctatgttgttatggcagccctggtaaatgaatatagagtctttctcaggcctactccccacgtcagatggcctctgcacctattgtcttgaatatacatttcccctcctctgcctggcagatcagctccaacactggtgtacctgcgtcccaccctccttcagacagagctaaccagccctgcatggtgctcattttgccctaggtccaccttttcattacagctctagcccaggcatttatctacccaccaagctgcttctctgcttagctgtgagatttttgaatttgtggaccaattcatttgcctcttcatggcctcagtgcccaatgcaaggcttagtgcatggataaatgcatggatgttaaatgtgtggataaatttgtgtggtgtagcggttgccgtctatcctttccttgtgtttggcagctctgaggcaaagcacactctgctctgatagatttgtgtccaggacctcctggcctatggccacaacttgctgtataatattagtttggatgctgttttaacaacttaaaaaattatcacattataaaaatgcattgcccctcctaaagtatatatcaaatattgagtcacagttacacttgctttgggtataatttgaaagaaaattaaaaacttcatttcccattaagacttcagttttcttctttcttaaagttatgggcaagtgtggtggctcacacctgtaatcccagtactttgggaggctgaggtgggaggattgcttgaggccaggagttcgagaccagcctgggcaacatagtgagacttagtctctacaaaaattacaaaaattagccaggtgtggccttcggtcccagccacgcaggaggatcacttgagcccaagaggtcaggaaccatgcgagtgccactgcattccagcctgggcagcaaagcaagacgctgtctcaaaaaaaaaaatgtttacaaattacctgggcataaaggttaagtccttggcatgtacttaacatagtatcaaaatattatctttgccaataacaagcttactgctaaagattcaagaagagaatttcagaacacataatcaagagacaaaagatatatccttgtattttataccaaagtagtttgagaagtcacaattcattcactagacagtaagttccatgatgatatcattctggttagttcactgctatacccctagcaactaaaattgtttttaacacagagaatatctataaaattaataaatgaatttataaaagacaaaaagtgaaaatattaccattgattcacagaatcactaatttcccggggaacaaagagtatctttgggagcaaaagtgtgagacacagcataatctttggtttgtttgtttctttaagatagggttttgctctgccatccaggatggaatgcagtggtgccattatggctcactgcagcctcctgggcttaggggatcctcccatctcagccttcctagtaggtgggactacaggcatgcaccaccgtgtccagctaatttttgaatttttccttattttagagacaagctctcactatgttgcccaggctgatctcaaactcctgacctcaagcagtcctcttgccttggcctcaaaagtggtggaatgacagcctgggttttcacttcagttactacaatagcattatgcacgttggccccaagggacagagagcttgctgtgttgactcacctttgcctctgacactatctttaaaaaggcagttaagcttcttggctcttttcccagaggtgagtcgctagttcacctgaaatacccagtcagtgcaaggagtccttctcaaggtgcacccccctcaggtatggtgggtgggtcctcttgttagttcagtcaaggggtgaccccccaggggtgggtcattttgttagttcagccaaggccttaaatattttccagaaaattctaatattcctttcattcagttcattaataagcagttaattactcctcttatacaaacacatgattcctttttcaagataaaaagagattttatgttctctgatctttctcaggtaatatacttctctatttcctcgctcctctccatctcccagccctcagcaaacctctttaaaatgtttgctttttgttctaagacatttgtgttagccccctgatgggcttagtgtcctaataggagggaacgatgttttgagtggatcccacttgttttcaaaagcatgttttcttaaacatgcttcaccttgacagtgaggccgacattgagtaatgtcagagcgtgcctctgctattctcttgaaagacgtgttaataaaacttgtctagcctcccaggctttctctttctggctggagggggaggttttcctctcattcattctgactcattttgttgtctcttcctcctaagagcctgcagcatatctgccacgaccatggtgtgtgactcaactgcatattttatcccagcgcttggcggcacctgcacggttttgtaagccagcaagaggctgcgtttctacccactgcaaatctttctttttacctgatttctatatcccacacagatccaacagacagaataaaggttatatttatctgcgagacccccaaaggtaggtagagtgttataaaaaatgaaaaacacatgccttaaaaacagagagattttaaagaaatatgaaatagtaaaataagaagaaattcaccatcaaatattagaaagtcatgtgagagaagaaaaaaataaagatgctatagtttgtgaatcattcctcctccacactaccgaactcttcacttgtgaactcttgtttcattgtattttaggtatttctttgcatgatttgttctcctttaggttttggttgctgtaggataaaaaccgggttttgtttacttccatatctccagtatccagcacagtgctttgctggtttggggctcaactgtgttgctgtgttggtgctcaataaaggtttattaacggcaagaaaagaaaaataaactgtttcctagagaagacagaaagcctattgagagagaagattggagtctaacacattaaccaaaaacagcacaaagcgtccctggaccataagaaaaggcgattttatgtggccataatgtcatgtcttgcctccagcttattggaaagatacagaggattacatacagaatcgagaggggagaagtgacggagtggggaatagggtaagactcattgcagatggtgaattttagagtggtgtttttcacacccacgctgtcctataggcggtaaggctgcaagcaaattaaattaatcacaaagtgtgaaatgcctatgaattcaccaggaatgatttggggatattttgagaattaaagatgagcaaaagaataatggtctaatgagagttggaagaaaaagaggtttcatcatcattgccatcctcttccttctcaacaccatcatcaaataagcagaaaacatagtgtcagtgtcaatacagctacacagggaaacatctgcctgatgagatgccttctagagagagatgccccttttatcagcaggtgcaggaggccaatgaggtaggcaggacaggcaatgaactgcagcttggtgcttgtttttccctgtgattttactatagttatcattgagtgcctccgttgatataaggttccctacagggttagtattctgttaacgtggaagaagatggaatcaggatttttatatcttctgaaacagatggttataatttaaactttatgaaatacaggaaagaagaaatgcaatcaaaaacctgaaagtcctagtttcttgttttccaggccaaagcctgcaggataattgtataaatagttctgagactcccttctatttttcttccttcctgaagacaatccgcaaagtgtccgtctggacatatctaatggttagccagatggcattccaagaatcgcttttctgaaagtctgagatctcatcagatacactggaatgatcttgagctggtggatgggaaacagcgccaaggagagaagctgtggaatggaaggaagggaagaatagaaaagggggaaatatttaatttaaaacatggaaggaacagttgagagtgagaagagaacagccttataggtattaaatctctcaccgtccttatgatgcagtgttgccctgagctagtctcaacactaccactgtatctctacagcagagtaaatgctatatttgggcttataattgtcacaatcaggattgctaactgcaacactttcctagctgaaatcaaacaggtttgaaagcaaattagaatggctttaagcaaagctcatgaaccttcccttcaggagcaaccagagctattccaggagaccccagcctcacatcaaatccatggctgatgctagaaatttgcccagaacttcagcaccttgagtctacttcttgtgagaatgtaccctccctatacaccattttttttcattagcactctcccagagttaatagtcaaagtaagctgtatactggtcattcaggggttagtgaatgaacttcaattttggtcctgagtataaggtttttaggcatacaaatgtttctattacattcatagatttgtgcaaccataactcttttaatggctgaataatattccattgtatggataccacattttgttgattatttcacgtgttcatggacacttgtgttttttctaccttttggctacggtgaatagtgctgtaaggaacaatggcacacacatttctgtttgagtccatgttttcaattattttaagtctataactagaagtcagattgtaattctatgtttagcttttgaggaacctccaattgttttcaactactgtaaatagtactgcaatgaacatttgtgtataaatatttgttcgaatacctgttttcaattgttttacttatatacctaggagtggactggctggatcatatggtaattctaagtttatctttttgaggaactgccaaactgttttccacagggctgcactagtttttgttcctttccaccagcattgtagaagggttccaatttctccacatcctcaccaatattgttattttccttttttttaatttttttatttttattttttgcagttgaaagatttaatagagtgaaaacagagctcccatacaaagggaggggacccaaagggggttgccgttgccggctcgaatgcctgggtttatatcctgatccttgtccctcccactgtgctctcaggcaatagatgattggctatttctttacctcctgtttttgcctaattagcattttagtgagctctctgattggtcaggtgtgagctaagttgcaagccccgtgtttaaaggtgaatgcagtcaccttcccagctaggtttagggattcttagtcagcctaggaaatccagctagtcctgtctctcagtaccccctctgaacaggaaaacccaagtgctgttggggaggttggctgatgaccgccctaactgcttcctgctgaactggggcatagtaggggttgtgcagttgagatttccttgggagggttgccttcgctgtcattaacattggagcatgggctagcaggctggtccaggggtctgtggtagatcttagtcatggactgcatctggggctccatttgaagaatgatttgtagttttacagctttgattctggaagagacaaacttaacaaggaggttaaagatacagggattgaaatgtatggcctgcagtacaggggattatttctttggcacactttacgggccctgactatctgcttgataattttgaaaaggcctggtccagtaaataataatttggccatctgatgggtgctatcaatgcctaaatattttccatttttaaaaatagccattctagtgggcatgaagtgttatctcattgtggttttgatttgcatttccataatgactaatgatattgagtatcttttcatgtgcttgttggtaatttgtgtattttctttggagaaatgtctattgaagtcttttgcccatttttaaattgagttgtcttttagttgttaggttgtgctggatgctagaccctttcaggcatataatttacaaatactttctcttattctatgaattgtattttcactctcttgatataattctttagagcacagaagttttaaattttgatgaagtctaattgttgtttgtggctttggtgtcatttctaagaattcatggacaaatgtgaggtcatgaagatttacctctatgttttcttccaagagtgttatagttttagctcttacatttagatttctgatcgatgttaagtaatttttatctatggtgtgaagtagaatccaattttattaatagtattttgcatgtgaatatccagttgtccctgcaccatttgttgaaaagactattcttttcctaccatgtggtcttggcatcctagtcaaaaatcagttgaccacagatgtataggtttgtactattcattctattttattggtctgtgtgtctacccttaaacaaaaataatgaagcataacaaatcaaaaatacgatcatatactaatataatacctacatagttatctttaccattgttctttctttttattattattgctctttatttttcatatagctttgagatactgtctaggtactagaattattttcattatagtttgaaggactttttcaggtctataggcagaaaactccctcagcttttttgtttatctaggaatgtctctcttctctgttcctgcttttaagattttttttcttcctgctttcaagattttcttcatctttgtcttttgatggtttgattatgtgtctggagttctttgagcttctttaaaatcaaatttgggaaatgtgaggctactctttcttcaaatattctttccatccctttctttctctgggactttcataatgcatatgttagaatactgcaaattattccacagttctttatgctctattcacatgtcttcattttttttctttctgttcctcaaactagataatttcaatgagctcatcaagtttactgattctttcttctgcctgcataaatctgctgttgaagctctagtaaaattttcatttcagttattgtatttttcagctccagaattcctatttgcttcctttatataattcaatttctttattgatatttttgtggcattatttgtctggtttcttttaatttttttgtcaatgattgcctttatctatttgaggatatttaaggcagttgatttaaagctttgcctagtaagacaatgtctgtgcttcctcagggatactttctgttcatttggctttttttcctgcaaattggccatactttcttgtatctttgtgcaccacgtgattttttggttagaaactgggcatgttatatatttaaatgtggtaagtggatataagattcttcaccttcctcaaggtttgttgttattgtttgctgtggatggcctcttaattctgttgtttctttagcttttggtcagctagtggtttcacagagattttcttaaaagaaaaaaaaataatagtctcctggtctttgcagattgggtctgtgttagggatactccttccacacttagccaggccatttacagctctgccttagccttcacttcctgctcacactgagcctaaaagtcagccagaggtgagagctaaggggcttttcaggtcttttctgggtatgcaccctgccctgggcatgcacatgactttctagatttcctgttatatgcaggagattaccaaatccctattccccaaagtaactctttccctggctttttctcctaggttgtagcatgtttattgtttgacccaactgtagtcttttacccaaggcagcaacagctcattcatttgcctattggtgttttcaaggaacccctctgcttagcaacttttctgcactgaaagagttctaagttagataaaaccaaagcaaacaccctgtgtcagtccttcaagggatccccagacaaacacaattctttaggaactaggtctgctctgctccctctggaactaggcacccccatcaggaatatgggttgcatcttaaaactgccagcatgctaggaaagggagaggagtaggacaaagctaagttaaaacaccacaaagctattctaccatgtttaagtcatcttttccttcattcaacattcacttggtttttggagaccagcactatagactaatgctgttgacaattttccagacttctgacaatgttgattgtgacagtttttgcttgtttatttgatgtttctgtggagggatgggcccttggaattccctactctcccatttttgctgatatcactctctcatactttcttttatatttgaaatattttgtaatctaaaagaggaaatgagaagtgttatctagctttgcgttatgtcttctgcaatatttctagccagacaccaaggtgaaggcatctaatgtaagaatgtgtgaggggtggccaaggagcccatagaaactcaaaagaaagtgtcataaagatgagacttacaaacctgagactggagtttcattaggtgggcctctaggaaacctcagtgactaaaggtcacagacttacagatctcagacattttcttcttcctatgatgcaatagaaatatacaatgcacaatcccacttgtgaagcattgttatcaaatgtttaaatcaaatctatttaagcgcctatttgatttaaatttttgacaagaatgcttcacaagtggggttgtgcattgtgtatttcctattgcatcatataaaggaacaacggagcatattaaatgaaccacaaggatacaatcagcaaattctggagtatcagaaatgctacaggacagacagctcagttcctccagcaaataaatggcaaggaaaggaaaatgggtgggcatggggaggaatggtgcaactcatagactaaaagcaatttaagagatacaacaaccaaatgcaatatatacaccttagtttttatctcaatttaaatcattatggggcaggtgaggacattttaacaatgactggatatttgattatcttaaaaagttaagtttttagctgtgataatggtattttggttaacttttaaacataagtccttatattttggagttacatagcaaagtgtttatggatgaaataatatggcatccgggatttgataccaaataatccactggagacagtgggacagtagagataaaacaagactggacatgtgctcaaaattgttggagctgagtgatgaatgtggagggattttatattgctatttctgttgtttaatatgtttgatattttccataaaaatacatttgaaaaatagtaactgagatacttatttctatagcacctagtagatctttgatatactatgttgatgaacttcaagtattgatgtgctatattgattaactacaatctttgatatgctatgttgattaacttcaataacttgggcactaaaactatttcactaagcatcaaacttaataaattcttccaaaaaagcaaaatcttaaaaaacttttaaaagcaaaaactttttgtaacaataaactttttctaaaattaaatgctgaatttagtatgtccaaattacctatattacttttgtctgtttatttagcatttgaaaaataatcatcttgtatagagaaatgtgatttaagatataagacaaccttacttatctttgtattatctctgggaaaacatcctacttctacttcttaagcgaagctttctgagattaaacaaaatttattgtcaaagaaactaatttcagtttgatttattttaactaaaatgtttactctgattgtttttagtcaggaaaaattcaaaactaagatttacatacagaacaaattataagccaggctaataagcttaatcagctaataatatcctcaaagagaatacttagcagaaaaacttactttggttcaagttaacctacttatgcctcaggatgcaatgttttgaatttttgcaatcagaccttggtgataactgagcagtaggatataaataactcccacaggtttgtgttccaataatggaacactaggcataagtgggttttgatagagaatgagaccagagcatcttgccatgaaatatgtttactccagatttccatattcccactatcacagcttaaaaaattatcgacttgtggtcaagcctattttacctacactcctagaaatttattctccagtacagataaaatttttgagaattatagaaggaaaaaagaatcttaatggaagatgtttttgtttgtgctgctataacaaaataccatacactggattatttataaacaatagaaattcatttctcacagttctggaggctgggaagtccaagatgaaggtgtcaataggttgcatgtctggagagggctgccctctgcttccaagatagtgccttgctgctgcagcctctggagggaaggaatgctgtgtcctcacatgactgaagagcagaagggaatgaacccactttctcaagcccttctataagggtcctaaccccattctttatggctcctcatgattgaatcacatcttcaaggcctcaccttttaattctatcactttggtgattgtttcaacatatgaattttggggggacacattcagaccacagcagaagcaaaaaaaaaaaaaatggaattgaaagaaaacaaatacgtggcaaatcaaaacttatgagatgtagttaaagatgtgcttagaaaaaaattatagccctaaatatactagagaggaagaaaggatgaaaatttgctaacctaactaaccaacttaagaagttcaaaaagaagagcaaattaaatcctaagacagtagaaggaaaaaaactaaagatcattgatgaattaattaataaagcacaaaaatgtaaaatagagagagacaatgaagccaaaagttggttctttggtaagactaataatcaaataaatccttagcaagactgaaaaagagaaaaagaggcacaagctgctaatatcaggactgtaaaaggacattgctaaagatctaagatttgaaaaaggtaataacaaggatgtcatcgatacctctgtaccaataaatttgaacatttagattaaatgagcaaatttccatataaatataacttatgaaaactgatgcaagatgaaataggacccttataaaagggtccttcagagagtggttcattcccttctgctcttcagccatgtgaggacacagcattcctcccctccagaggctgcagcaacaaggcactaccttggaagcagagaacagccctctccagacatgcgacctattgacaccctgatattggacttcccagtctccagaactgtgagaaacgaatttcatctaaattgaatatctattaaggaaactgaatttatgactttcattcaaagaaaactctaggattccactactagaaatcctagtggggatggccccactggtgaagtcttccatatatctaagaaaaaataatatcactcttacacaaattattcctaaaaatggaaaaaagaggaagcatttcccaacttattttatgaagacagcataatcttgataccaacaaaggcagcataaaaaaagaatattacagattaatctttctcaaaaacataaatgcaaaaatcctttaaaaatagggaattaaatcccacatagaaaggataatacatcataaccaagttgggcttattctaggaacgcaatattgacttgacatttgaaaaccaattatataattcagcacatcaacagaataaagaagaaaaaatcatatgatggatgactgataaatggagagaaaaatttgataagatgcagctcccatttatttaaaacctcttagcaaactaggaatggaaggcagttttcttaaagataatatagtgggttgaactgtggctcccaaaagggtatgtccaaatcatatctcccagaactgtgaatgtgatggcatttggaaaaaaagagttgatggagcaatgtggctgaatagaagcctccaccgatcaccctccttgcaggaataccaaattttaacaactaactacacacaaaaaaagcaccattataagaatcaaaaatcaggtcagaaatcacagtacctggttttgccattttattactgaaagaggcactgaagagggtagggaaaacaatcttgaatcatctacatcacccctccctcttgccctagcatctcttgcctagatctcttggagagagaatctgcacattttggggagtgagagcacagggactaggagacttggcattgaactccatgctttcctgtcacagcagacagcaaagccatgctggttcagccagcacctgcccatggacagagcattgacaccttagccagaggggaattgtccatcccagcagttggaacttgagtttcttggcaagcctcaccactgcagactaatgtgctctggggtaaacttgaaaggcagtctaggacacaaggactgcaattcctaggacagtcctagtgctgggtgggggttagagccagtgaactagggtggcatgtgacctagtgagacaccagctggaatggctaaagcagtgcttgtgccaccccttccccaaccccatgcagcacagcttgcagcaaagaaagtgactccttccttctgcttgaggagaggagagcaaagagtaaaaaggactttgtcttgcatcttggataccagcttagccacaatagaatagggcactggggctgggcatggtggctcacacctgtaatcccagcactttgggaggccaaggtgagtggatcacttgagctcaggagtttgagaccagcctggccaacatggtgaaaccccatctttactaaaaatacaaaaaattagccgggtgtggtggctcatacctgtgtcccagctactcaggaagctgaagcaggagaatcgcttgaacctgggaggtggaggttgcagtgagctaagatcatgccactgcactccagcctgggtgacagagtgagactgtctcaaaaaaaaaaaaaaaattgggcagtgggcagagttgtgaggcccccttcccaggccttcgctcccagatggcacttctagacataccctgggccagaagggaacctgctgccttgaaagaaagaacccagtaatggaagattacctgctgactaaagagcccttgggccctgaataacgagtggcaatgcccagattgtacgctgtgggcattgggctctaagatgtgctggcttcaggtgagtcccaggacattacaaactgtgatgctatggtgaaagactccttctgcttgagaaaagcagagggaaaattaaaggggattttgtcttgcaccctaggtacaaaccagcttggccacagtggggcagagcaccaagtagactcttggggttactgaatccaggtatacgctcttggacagcacttctggacctgctctgggacagaggggaacacactatcctgaaaggtgagtctcaggctgggcagcattcaccacaagctgactgaagagaccttgggctttaagtgaacattggtggtggcctcgcagaactccctgtgggctagtggtggtggtggccactgggagagactcatctgcctgtggaaaggggagggaagagccggaagaaggactttgtcttgtgatctgagggccagcttagctgcagtagaatagaataccaggtagatttctaagattttctgactataattcctggctcccagacaacacatttgaacctgcctagaacctggtggatcttgccaccctgaagggaaggacacaaacctgtctggcttctccacctgctgattgcagaaccctagggccttgagtgaatataggtggtagccaggtagtggttatggcaggtcttgggcaagacctagtgctgtgctggctttaagtctaatgtagcatagtcctagtagtggcggccacaggagtgcttgcatcattccacccccagctccaggcagctcatcacagagagaaagagactccatttgtgtgggagaaagtaaggaaagagaacaagcgtatctgcctcataatccggggatctttttcctgatcttatccaagaccaccgaagtggtacctctacaagtcagcaagaaccacagttattgcacttggggcccaatccctttgaatgcttagaaagtcttcccaagaaaggggggcacaaacaagcgcagactgtaaagactgtaaaaaaacacctaacccaaacactgaagaacatccacaagcgtcaagaccatccagaaaaacatgaccttaccaaatgaactaaatagggcaccagggaccaatcctggagaaatagagatatgtgacccttcagacagagaattcaaaatagctgttctgaggaaactcaaagaaatttaagataacacagagaagaaattcagagttctatcagataaatttaacaaacagattgaaataattaaaaagaatcaagcagaaattccagagttgaaaaatgcaattgacatcataaagaatgcatgagtctgttaatagcagaattgatctaaaagaaagaattagtgagcttgaagataggctatttgaaaatacacagtcagaggagacaaaagaagagaataaaaaagaatgacacatgcctacaagagctagaaaatatcctcaaaaggtcaaatcacagaattattggccttacagaggaggtagagaaaaagataacggtaaaaagtttattcaaagggataataacagagaacttcccaaacctaaagaaaaatatcaacatgcaagtacaagaaggttatagaacaccaaacagatttaacccaaagaagactacattaaagcatttaataatcaaactcccaaaggtcaaggataaagaaaggatcctaaaggcaccaagagaaaagaaagaaataacataaaatggagcttcaatacatccgtcagcagacttttcagtggaaactttacaggccaggagagagtggcatgacatatttaaagtgctgaaggaaaaaaaactttaccctagatagtatatccagccaaaatgtcctacaaacataaaggatatatatggattaaaaagcaagaccctgtgatctattgcaaatgatttttcttctttattctgttgatatgctgaattgtattaattgtttttcaatgtcaaggatatattgaatgcaaatggaataaactcttcaatcaaaagacacagaatggctgaatggattaaaaagcaagacccaatgatctgttgcctagaagaaacacatttcacctataaagatatatagactgaaaataagagatggaaaaagatattccacgcaaatagaaaccaaaaaagagcaggagtagctatacctatgtcatacaaaatagatttcaagacaaaatctgtaagaagagacaaaagtcattatgtagtaataaaggggtcaatttagcaagaggatataacaattgcaaatatatatgaacccaatgctggagcacccagatacacaatgcaaatattattaaagagagagagacagataagccccaatacaataatagctggagacttcaataccccacttctagcattggacagatcttccagacagaaaatcaacagagaaacattggacttaatctgcactgtagaacaaatggacctaacagatatttacaaaacatttcatccaatggctgcaaaatacacattcttttcctcagcacatggattatttttaaggatagaccatatgttaggtgacaaagcaaatcttaaaacattcaaaaaaacctgaaataatatcacccatcttctctaaccacaatggaataaaattagaaatcataacaagaggtattttgtaaaccatacaaacacatggaagttaaacaatatgctcctgaatgaccactgggtcaacatgaagaaattaagaaggaaactgaaaaatgtcgtgaaacaaatgataatggaaacacaacatacccaaacctatgggatatagcaaaagcagtactaagagggaaatttatagccataaatgcctacatcaaaatagaagaaaaacttcaaataacctaatgatgcatcttagagaactagaaaagcaagagccaataaagcccaaaattagtagaagaaatgataaaaatcacagcagaaataaatgaaattgaatgaagaaaacgatacagaagataaatgaaataaaaagttggtattttgaaaagataaataacgttgacaaatgtttagccagactaagaaaaaaagagagaagacccaaataagtaaaattagcaatgaaaaaggagacatcatgatcaatactacaggaattcaaaggatcattagtggctactataagcaactatatcccaataaattggaaaatctggaagaaatggacaaatttctagatacatacaacctaccaagattgaactgggaggaaatccaaaacctgaacagaccaataacaagtaatgagatggaagctgtaatagagtcttccagtaaagaaaaccccgggacccgatggctttattgctgaattctaccaaacatttaaagaataccaatcctatttgaactactccaagaaaatatagaaggagggaattcttccaaactcattctatgaggccagtattacccgggtaccaaaaccagacaaaggcacatcaaaaaaaggagaaaactacaggccaatatctgtgatgaatattgatgtaaaaatcctcaacaaaatactaacaaaccaaattcaacaatacattaaaaaaatcactcattcatgaccaattgggatttattccagggttgcaaggatggttcaaatgcaaatcaatcaatgtgatatgtcatatcaacagaataaaggacaaaaaccatatgatcatttcaactgacgctgagaaagcatttgataacattcaacaacctttcatgattaaaaaaaatcctaaaaaaactgggtataaaagaaacatacctcaacataataaaaaatatatatatgacagattcacagctagtataatgtagaatgggaaaaaactgaaagcctttcctctaacatctggaacacaacaaagatgcccactttcaccacggttactcaacctgatactagaaatcctagctagagcaatcagacaagagaaagaaataaggggcattcaaactggaaagaaatgagttatccttgtttgcagacgatataatcttatatttggaaaaacctaaagattccaccaagaaactttagtaaaactgaaatgaaaaacttcagtatctttcagaaaaactgcaggatataaaatcaacatacaaaaatcagtagcatttttatataccaacagtgaataatctgaaaaagaaatttaaaaagcaattccatttaaaatagccacatataaaagtaaacacctaggaattagcttaaccaaagaagtgaaacatttatacaatcataactataaaacactgataaaagaaatcgaagaggacacagaaaaaggaaagtcacaaaaattctacagaagaggacatacaaaaatattccatgttattgatcggaagaattaatatggttaaaatgttcatactagccaaagaaatctacagattcaatgcaatccctgttaaaataccagtgacattcttcacagaaacagaaaaaaaatccataaaatttgtatggaaccacatacaagctatccataacatttccataaaatttgtatggaaacacaaacgacccataacagccaaagctatcctgagcaaaaagaacaaaactggaggaatcacattatctgacttcaaattgtactacatagctatggtaaccaaaacagcatggtcctggcataaaaacagacacacagaccatggaacagaatagagaacctagaaacaagtccacacacttacagtgaactcatttttgacagaggtgccaagaacatacactgcggaaaagaaactctcttgaataaatgatgttgggaaaactgtatatccatacgcagaaaactttaactagacccctgtctcttgccatatacaaaaataaaatcaaagtggattacagactttaatctaagacctcaaactatgaaacttctacaagaaaacattggggaaatgctccaggacattggtctgggcaaaaatttcttgagtaacaccccacaagcataagcaaccaaagcaaaaatgtacaaatgggatcacatcaagttaaaaagcttctgcatagcaaaggaaacaatcaacaaagtgaagagacaacccacagaatgggagaaaatatttgcaaacttaaccctgtgacaagggattaataaccagaatatataaggatctcaaacaacactatagaaaaaatttgaagaatccaattttaaaaatgggcaaaagacctgagtagatatctctcaaaagataacatacaaatgtcaaacaagcatatgaaaaggtgtgcaacatcattgatcaccagagaaatgcaaatcaaaactacaatgaggtatcatctcaccccagttaaaatggcttttatcaaaagacaggcaataacaaatgctagcaaggaggtggagaaaagggaaccctcatacattgttgggggaaatgtaaattagaacaactatggagaacagtttggaggttcctcaaaaacctaaaaatagagttatcctttgggagggcgaggtgggcagatcacgaagtcaggagttcatgaccaggctggcgaacacagtgagatcctgtctctactaaaaacacaaaaattagctgggtcttgtggcaggcacctgtaatcccagctacatgggaggctgagtcaggagaatcacttgaacccgggaggcagaagttgcagtgagctgagatcgcaccattgcactccagcctaggcgaccagagtgaaactccatctcacacacacacacacaaaaaaaaagaaaagaaaaaaatagagttatcatatgatccagtaatcctactgctgggtatatacccaaaagaaaggaaattagtatgctgaagggatatctgcactcccatgtttattgaagcaccattcgcaatagccaagacatggaagcaacctaagttgctttacatacatcaacagatgaatggataaagcaaatgtggtacatatataccatggagtactattcagccatgagaaagaatgagatcctatcatttgcaacaacatggatggaactcaatgtcattatattaagtgaaataagccaggcacagaaagataaatttcatatgttctcacttattatgtgggaactaaaaatcaaaacaattgaactcatggagatagagagtagaaggatggttactagaggctgggaagagtagtgagggagtgggggttggggggaagtggggatgattaatgggtacaaaaagtacatatagttagaaagaatgagtaagaccttgtattagtctgctgataaagacatacctgagactgcataatttatacaggaaagggatttaattgactcaaagttccacatggctggggaggcctcacaatcatggaaggaggaggagcaaagtcacatcttacatggcagtaggcaagagagcgtgtgccctttataaaatcaccagagtcactatcccgagaataacatgggaaaacccgcccccatgattcagttacctcccatggggttcctcctatgacacatgggaattatgggagctacagttcaagatgagatttgggtggggacacagccaaaccatatcaaacttagtatttgatagcacaacaggaggactgtagtcaataatgatttaattgtacatttaaaaataactaaaagggtgtaattggattgtttgtaatgcaaaggataaatgcttcaggggatggattccccatttaccatgatgtgagtcttacacattacatgactgtatcaaagtatctcatgtaccccataaatatatacacctactatgtacccacaaaaattaaaaactaaaaaagtttaaaagggtctctgtagttgtaattaagttgagaaccttgagatggggtcatcttggatttagggagtaccctaagtccaatgaagaggagaagacacagagacacagagaaaaggccatgtgaagatggagacagagattggggtgatgcatccatcagccaaggaatgccaagcattgctgacgatcaccagaaacgaggagaaatacaggaaacagattctccctcagagcttccagaaggaaacaacaccaccaacattttgatttcagacttctggcctccagaactgttggagaatgaatttttgttgttttaagccaccaagttgtgctaatttgttaaagcaaccttaggaaatcaatacaaggggtaccgacaaataacctcttgcaaaaactatactcaatggaaaaatatagaataccttttccctgaaatcaggagggaaaaaagggtgaccaccatcatcacttctcttcaacattgaaggggaggttctggccagtgcactaaggggagaaaaagaaataaaagtcataaatattgtaaagaaagaaattaggctgggcacagtggctcatgcctgtaattccagcaccttgaggctgaggcgggcagatcacctgaggtcaggatttcgagaccagcctggccaacatggtgaaactctacttctaccaaaaatacaaaaattagccaggcgtggtagtggcgcctgtaattccagctatttgagggctgaggcatgagaatcgcttgaacccgggaggcggagtttgcagtgagctgaggtcacaccattgcactccagcctggatgataaggagagactgtgtctcaaaaaaaacaaaaaatttaaattgtgataaaatcatttttggataatgtgattctgtatatttaaaaacatctgaaagaatgtacagacaggctggctgcagtggctcacacttgtaatcctaacacttcgggaggctgaggcaggacgattgcttaagcccaagagctcaagaccagcctgggcaacaagtgagaccccatcactataaaatttaaaaaataaaaataaataatgtccaggtaaattcttagatctgtctctcagtcatgcgaggacacagtaagaagggcatcatctaaaggcgggaaacagacctcaccagattctaaatctgctagcaccttgttcgtgaactttccagcctccagaactgagagaaatacatttctggtgtttaagccaccaagtcttggtattttgttatagcagcctgagcttattcttttaggttttaaacgttttaagttttaaaacttaaattttttagaaaaaataacaattttaaccagttttatttttcctttctggtgttatggaacataatgaggttcttgttactttttcctcaattgttgattaaagttgccacttaagtgtgaagtttagataaacaacaaatttaggagacatgataaaaagttcattgtttatctgaaattattattatcattttttttgagatggagtctcactctcttgcctagactggagtgcagtggcatgatctcagctcactgcaacctctgcctcccaggttcaagcgcttttcctgtctcagcctcccaagtagctggaattacaggtccatgccaccacaccctgctaatttttgtatttttagtagagacggtgcttcaccatgttggccaggcttgtctcgaactcctgacctcaaatgatctgccctcttttacctcccaaagtgctgggattacaggcatgagccactgtgcccggcctgaaattcatctaatcaagcatcttgtatttttatttgctaaactttgatggatcttttttctgtgggtcaccattttcacaaaaaagagattgattaactcttgctaaataggaaattggcaggcaggaaatgtgaagaaggtccagctttagacagaattattctgtaggtgtatctaacaagtccttctcctcttgttctgtttaacaaccataacttactgtaagtaataagcaatgatggaaacttccatagagaagagaaggctttagagttagttacacctgagctcaaatcctagcagcatcttttattagctttgtgaccttgggcaagtaactcaatcttcatctgtaaaatagtaatactattactaaaagccttccacattgccataaaccttaaataaaataatatatgtaataacttagcatgacagctgccataaattaaagttctcaacaaatagcggttcactttttttctatattggagacaaggtctcactctgttgccgaggctggagtgcagcagcacgatctcagctcattgcagccttgacctccccaggctcaggtgatcctcccacctcagcctcctgagtagctgggactacagctgcacaccaccatgcccagctaatttttttgtagagatggggttttgccatgttggccaagctggtctcaaactcctgggctcaagtgatcctcccaccttggcctcccaaagttctgggattacaggtgtgagccaccgcacttggcccaaatggcagttcttcttgttagtgttgatacatggtccctttcttttataccattaaggaaaggacataaaataaatgcacaaatgactataatacgaggcatacaatgatgttggtgaaatagggaaggtattatattatggaacttcagacgagaagtcatctaccctttgattcttgcaatcagatgttcactcgacacatagtaattgaacttgaaccatgcacaggtacactacgggctacatttgatgtggaatttagagtaatgccatagactgtttatgtccctccaaaattcatatgttgaaaccaaatcccaaaggtgctggaatttagaggtgaggcctttgggaagtgattaggtcctgaggatggaaccctcttgaatggaattagtgcccttatgaaagaggctccagagaactctcatgcctcttctgccatgtgaagtcacagcaagaagatggccatctgtgagccaggaagtgggccctcaacagacaccaaatctaccagtgccttgatcttggacttcccgtcctccagaactatgagaaatttctgttgttcacaaactacccaatcttggtatttttgttatagcagcccaagtggattaagacaacaaaggacattctaagtggcaaaaacaccttgaagactttttaagtggagaaagcagctttctccatggtgggaaaaatagggaatacatatagggaatagcacatgaccttgtttgaaggtgaaaagaggaggagagtcaggagatggggtggctctaagtgctgggtctaaggatctgggcttgatgtcacatccatgggggtgctattaaatgtattttagcagggccatgaaagatgaggatgcacaaaagagtattctgcagcattgcacaaaaaggaatgagacggagatttcctagtggcttggggagggaggacactgagttcaggatctattgcaataatgctgatttcatcactcccctgcttaagactctttaatggcttccagctacccagaggatcaagtccagagtgctttagctggtctaaaagacctgcatgttctggctcctgcctactcctcccaccttatgtctctgggctctggccacaaggcctttcttcagccccttgggctgttgggactctcccatatcttgggcttcatgttcgctcttccatctccctggcatgttctcctcctaccatgtggccctggtaaaccctactcatcattcatatgttagcttaactgaccctctgagggaagttttcctggagcctctaattggatgaggttttcccattgtacactcccagagcatcctagggttctcctatgcgcacgcttcactatttgcatatttgtaatcatttgcttactgcctataactctaggtaggagggcaggaactcagcatacactcccccttttcttttttttttgagacagaatctggctgtgtgcccaggctagagtgcaatggtgggatctcggctcactgcaacctccacctcctgtgttcaagcgattctcctgcctcagcctcctgaggagctgggactacaggcacgtgccaccacgcccagctaattttttgtatttttagtagagacggggtttcaccattttggccaggatgctttcgatctcttgacctcatgatctgcccatctcggcctcccaaaatgctgggattacaggtgtgagccaccgcgcccggccagcatacaccaccctttgggtactaagtagttggctgtcaataaatacttattgacggatggacatggtggacagtaacggactccttcgattaggatgatggcaatggaaataacaaggaggggatggagaaatatgaatctggaagtccatgcttgcctctctccaaatggaatggtctagaacaggggtcagcaaactgtgagtggggccaaatcaggccagctgcctgttttgtaaatgcagttttattggaacagagccacattcattcatttatgtattgtttatggcggccctcacttcgcaatgacagagttgaggagttgcaatggtgagcggcggggcggcctgcaaaacctgaaatatttactatctggccctatatagaaaaagtttgcaaaccgccaccctaaaagaaagactgcatggaggttcgccataataattacagtggttatctttgtgtggcaggattatagatgggctttatattcttcttaattttctgcattattcatattttctatgaagaacattattttttataatcagtaaaacaataaaggttattaaaaaacagattgagtgccccactaattctttttaatttttaacttctaagtgttttacacttttttaagggaaaatcttgtgaaccagagctctttgctttgctggctttggagggcagagccagacaactctaagagcaacagaggaaatctctgctcccctgttttctgccccagtgggactgtgcttttctgctagttggagtctggcttctaattctaggtttacataatcaagctgagtgtttctataaaacttggattccattatatgtgtagttgtcacaaactatacatgtccataatcagcaactttatggaacacttaatatctagcagtattctgactggaacctattttctagagtttaataacaattattaactaaagctgcaaagtgtagacccacaactttaacagtgattgcagattttttttaaaaaaaagtgttagcaaatgacttcaattaaaacagaaaatgaatttgccagattttcgttcatggctgtgtccccagcataaggagcacataatacgtgcttaacaaatatcggttaaatcaagaaatgaattactataaaagaaataggaggccaggtgtggtggctcacgcctataatcccagcactttgggaggctgaggcgggcggatctcccgaggtcaggagttcaagaccagcctggccaacatggtgaaaccccatctctaataaaaatacaaaaattagctgggtgtggtggtgtgcgcctgtaatcccaactacttgggaggctgaggcaggagaatcacttgaacccaggaggcagaggttgcagtaagccgagatcataccactgcactccaccctggcaacagagcaagactccatctcagaaaaaaaataaaaaaaaggaaaaaagtgatactcagggaaaatgatcttttacaaaacatttctattaagtataagaacaatgtgtactcttagaaatactgaaaattaggaaaaggagaaaaaaatcaaatctattatctcaaatttaaacctatgagtctggacacactctgggagactgaggtaggaggaccccttgagcccagaaagttcaagaccagcctgggcaatgtagggagaccccatctccaccaaaaaaaaaaaaaaaaaatttagctgggtgtactagcaggcacttacagtcccagctactcaggagactgaggtgggaggatcgcttgaacctgggaagtcaaggctacagtgagctgtgatcatgccactgccctccagcctcaatgacagggcaagaccctgtctgaaataaaaataaaaataaagctatcatcatcattattttgttgcactgctctcattctttttccatatgcctagctttggaaatgtaatgttaactatgtacatttacaattttgtcttcctcttaaaattaatcttataacataaaaattttccatgtaatttcaaggtctttgtaaacattaattttaatgattatataataaatgaagtggaattccattatttacttaatttccacagtagtttcttttctttttttttcttttttgcccaatctggtagacaaaggtatagtttcttttcttttgtaattataaatactactacaaatagctttgtgcatttagccatttttcaaataaagcacttgacaggtagcatatcagcccggagcgtctacggaatgctacagtaacaaaccctcaaatctccgtgctatgacaacaatggtttatttcatgttcatgctatatgtccactgcaaaaacagaataatggaataaagtcctataaaaattcagttccctgcaatttgattcaacaaatatgtgttgagtgcctgttattaacaaggcccactgctagtcctgaatgtagttgaaaagattttctgatgagtcacagataaaatgaaaagtgggaacttcattttcatcacatgctgtacggcagcagaaaaaaaatcaataaggcaaaagatcatttttcttagtgtagtcatttgtataccatgtctgtattgtttcagatgtgactctctttttctatctgcctctgaaaagcactcctttatgcttcaaggacagcctggtgtgtctctagaccagtggaaagcttgatagagtcaatgccaggccctgggatccccagccttggttttgcaacacacaagtgttccctgtgaccttaaatgctgttgtgaaactttccaaacaaaacacatttcaatgcatgaaaaacaaataaaagaaaaaatacccattagaccaataatctccatcctatgaattttcctaaggaaatattccaacaaaggaaaaaaccatatacacatgaaaatccttgttgtagatatttgtaatagcaaaagattgcaggtaaattgtagtatgtgtactagatggaatacaatgaatcagtaaacattgataaaagtatgaaattatgtagaaacacaaatgtttatgatttaaaaggaaaataaaatttcacctatgttgtagaattatataacacgaatacgttttttaaaaactagtaggaaacataaaatggctgatttgttacgaaatagaacttctgcattgtttttaaagatttgtatttcttctatttttaacattcaaagcaataaaactttttttttttttttttttttttttttttttttttttttgagatggagtctcactctgtcgcccaggctggagtgcagtggcacgatctcggctcactgcaacctccacctcccaggttcacaccattctcctgcctcagcttcccaagtagctgggactacaggcgcctgccaccatgcccagctaattttttttgcatttttagtagagacagggtttcaccgtgttagccaggatggtctcaatctcctgaccttgtgatccgcctgccttggcctcccaaagtgcttggatttcaggcgtgagccaccaggcccggccaacattttttaaaaatacaataaaacccattcctgggaggaactctatgttcaattaatgtttttaaaagttggaagtaaagacttaggtagattgctaacactgtgttgggatgtttgtttggtagctcttctggaagcaactgatcagctccccctttttctgctatgcccttattcctcatcgctcatagactgaatcatcgaaataaaatgttttgaaatagagctgtttggagaaaagaatatccattgctatctcttgatatcactttccaaaactcagaaaatgaatagttttgaatgccaaggcatgcttcgatatgaaatctgtggatctaggtgacagaagacatttttcagaactgactataatcaagtctttcattttgcattgagtgggcacacagcagacacccgataaattgttgatggaatgaaaaggaggtgagggctctctgtgccctccagatcagcaggcattcaatgtgggaggcaggaaggaccatgggatgaggcccagcagcccctgcagagagccctctctccacccgccccagccccacggagatcctggaggaggcatgagcaagagcaggcccagcgttggtgggttgatggttctagggcgttccaaccaattttcacaccctgtcaacaaaagtggaagaagggactgttgaaaaccaccaaggagctgctgggttcctgtacctcacgtcagccaattacattctttactggaagctctcttgggctctgatgctgtaagaacagactcttggaaccaacatttatccttgaatcaaaaactcgttggaaacattactgtgctctgccatttgaatccgtaatacgccaccaaggccagagacttttttttctttagtatctgtaacaactctttgttgatgatgttagttttggtgttttggttttgcctggagcagatcccaatttctccttcgtaaacttgatgactggcacagcacagcaggagccttctaaatagctcaagtggcatcaatctcagcagccagtggccacatgccacctcgtcaccttggctggggtcctgtagacagcacggtggctggtggcatctgttttggctgcttctctgggctgtgcctgagcagtgaagagaccagtgtgggtttaccagtgaccaggaagtccttgttgaaagaaagatgggaacaagtcttaaagagataattagcatattcccggggaaatgacccttgactgttagacacaggcacttgcagtgagcagctgcaatgttactgttcaggccaccctggtaagggatcccacaggatcaggggcccagccagtctgggtagccccagtggctttgtctctgtgtcttcttttgccctactttgttgcaaatttagctaaaatatgtttatcccttgggtcattgtgcagtttcaactccctttgcaaaatatttccccaggagaaactggagagtaatttttaagtatgagtaatgaattagactccagccacattttctggggaacaggcaggtgattttttctcttttcacactgcaaagagatcctagaacgctgacatctgcaggatgccagcctcacctgcattcctgactgttggtttgcttctttaatgtagaagctt

SEQ ID NO: 36 - DNA, 172649 bp, Homo sapiens
gaattcttttggttacattagggaaatcacaataacatgctttcatagttaattgggtatgtcaccgagacaactttagctctagtcttttagatggaccaactcaaaagagggacttgaaaagctttacatatgtgtgctgggcaataagtcacattttttagaatttttcatgagagcttattaaacaaatatagcaacagttatttctaggttaacaggcactgtgttataataagtatattgtaggcactgtgctaggtgcagagaatgcagttatgaatgagacacgtgctttgccaccaagggacttaaacacgaatcaagaagatagacaagtgagtaggaagtcaattataggaggattaatggcactatgggactgtattagtgggctagcaaggggatagggaggtatgatggataggggattagaaaaaaatggcatgtgagctgagtcaaagagtagatctctgtgtcaagcattcattcatctgtwtctytwtttytttttggagaccgagtctcgctctgtcacccaggctggagtgcagtggaatgatctcggctcactgcaagctccgccttccgggttcacgcaattctcctgcctcagcctccccagtagctgggactacaggcgcccgccactacgcccagctaattttttgtatttttagtagagacggggtttcaccgtggtctcgatctcctgacctcaggatccgcccgcctcggcctcccaaagtgctgggattacaggcgtgagccaccgcgcccggcctcatctgtttctttagtcattacataatcattcacttttgttccttccttcagctggcctttattggaagctgtagcagacactcttggttgatctcatgctcatttccaaccttcttattcctaatcaccttcaaaacaagggtgaccatttgacccaattctagccaataaggtaaaaaccgctgcaaggatgaatcctgagtaacattttaattccctgacatggataccaccgtttttctttctttttttctgttcactggattgtatgtatgatgactggagcttctgcagccagaatacaatcatgaggaaaaagtgcagagggtttccactgaatagagttggagcaagtgtattgtgcctctgaactagcaccagcaatcatctgtctctgaatatcttatgtgaaaaaaataaacttccgtttgttcaagatgctgtggttcactttttctgttacctgcaactgaaaatattcctaacaaatttgggagtctgcttttggccaggacttttgtttggtggtctcttaataaagttgtctgttgcaaacaacttaaaaaggacagcccatgacaaaggagcaggtgataatatctcttcagttactcctcttcccttagtgagtgaggcactaagatttataactgggagattgggatgggagttattggtgtctggccccctgtctcagcaccatcgtatatttccttaatgaagtgcgagaccaggactccataaattcacatagtagcagaagcgggcagcagctcgtcagcagagctattcagagagcccagcatcactctttgcgtattagagaagttcacagccagttaaaaataggcttggagagaagtcgcttttagaccacagctcattttggatttctctggagccccattctgggccacagtgtatttccttttttctttcgttctagtaagagtactcaggcagttcagagacaatagatacatggttatctttagttctgttgtgcacagaaagcagaactatgaaaaaacaacagtaacttattgggcacatggactgttacagctttttaataaatggcaacacccactcagcctttacgaggggccagtgctttaaatcctcaaaacaaccaggtgagaaaaatgctattaataacctcatatccctgatgaggaacctatgattcagagcaaataagcaatgtacactgctattaagtagcagtatcaaaatttgaacccaggtctgtctgattccattcagagcctgtagtcttagcctccattcattcaaagtcacacatggctttctgtgtcactcaattttcatccttagaggagacctgtgaaataggcagggcaaggaaatgatcccaatttactaggagaaaacctaggaccagagaagtgaaagaattctttaaggttgaccagtccatgtgcaatagaactgggacttgaatcccatcttctaactctgagtcctgactttgctctgccatggcaggctgagtgctggagcagttcagttttgaaaaaacaccctgaaattgtttgaaactgtttttggttgacttctgagtttcaacacccaaccctgtatcaagaaaccaactaacccagggctgccctgatttatttagggtcttttagagatcagttcctgcctagcacctctgtcgaatgatatttggtactttcatttaaaatttcaaatataatatttcaaatttaaccatccttcaaattatggcaagagagtgtgagctggagggatcaatgtctttatcaggggcacggccaatttagctgataaagtgagtataatatctctttgaacattacaattatccagtgacaaggaagctgacaattagcttataagagttgagtatagggattgtacgtgtgaatatttttttaaacacctgagttttggaaaataaaagtggcctgcccacattttcaagcacagtggtaatcaaaagagagctctgtggaggtaataataccttgtattttaaatactgcttgtctttgaagagctcaaatcactctataatcatttccttattatgattctcaaaacttcctgggtcaaaaagttacaaagtttatatcttaacagtctggcctcagtttcttctttgggaatttgaggtggaagaccaggttgctaagagctctgtcagtacaaacaccttttccaccttctccccacctagccctctcccatctccaaggcccctgccctgcaatccagctaccctacttagcctcttatttttttctagatctaacaagttaatctcattatatagaaccatagattattttaattcggagagtttcacaccagtgagctggaggctgaacaactggctcgaggtgggaagggggagcggcccttcagttagagcagtttcatttttatctgcttttatacattggggatcagcataagattttatttttaagaaggattttgatgtttaaaaaattgcaatctggtcattcagtccagctccctcattttactgataggaaaactgaggcccagaacaagggagtcacctgttcaaggtctcatcccagctcctgagagaactgcctgtccttgaacactgatccctgggtgccagtcccggggggtcttggcaggcctctaggttgcttgtccccagaagtcactttcacaacaaaagtccgaaatgtagactagtaaccatggactcatgccttgggggctttaaatgcacctgcccacagacttttcctccctttttagagttaaaggcactcattttacctgggaacatttgactagaccatgcagaaagaaacgagtagaattagtatgtgccattttcacctagtcccaaaatggttctccacctcaactaggtcatgaagaaaaaaagtgtaagtacaaacatacacatatatttatatagctattgccttccagtgagctcaaagcatacacacacacacacacacacacacacacacacacacacatatatgtcattagttcttctgggggaaaggaagagcagttattgtctgcctcattttgtatgagactatcaaggcagagaataaattgatcttgactcaaatcatgggctgaattggtggtgttggtgtaggggtgtctaagctaagcacttgttgtatcatgttctgctctgctccaggagcaaagtctgggaagttgaggacctgagctctagccctgtgtcaggctgcacccgtgagcaggtgtttcattccctgagtttcagtttccccatatggtaaatgaatagaggagtggcattgatcattttttctctatggctcctttctctgtcctggaagtgacgtttggaggattgaaaggaacagagctgagcctggagcagcccacctgaatgaggtgtgtctgcccctcacttccttaacccagaatattccaaactctggggagtgtgcaatgtatacccccatgtaatagttttgttggggtcctgggccatactgcaggccaagagttgggacagctccataaagggaatccaagtcccagctgctatgtaatcctgggactgaaaatgtggatggggtgtgtttatgtcggtgtgggtgcatggggagggaggagtgtgcaggagcttgtgggtagcgaatggtatattgtgggtccaagctgtaagtcgtggagatgccaggagtgattctcccggtgtggagcttgcctcctgggtctcaagaagacaggctagaagcaagatgggtggtccgttagggacacacgtagcactctgggaaccagcagtggctttaagctattagtggccttacttctttctcattttcactagaatgtccgttacctcattaaaagttatccctgaaattactccatggacaatacacaaatgggcaacacacacatgaaaagatgctcaacttcactagtcactagagaaatgcaaatcaaaaccgtaatgtggtaccacttcccactcactagaatgactgtaataaaaaacaaaataaaacaaacaacccagaaaatagcaagtgttggcaaggatatggagaaaataaaacctcatatatttctggtggaggccaggcaccttggctcatgcctgtaatcccagcactttgggaggctgaggctggtggatcacctgaggtcaagagttcgagaccagccaggccaacatggtgaaaccccatctctactaaaaaatacaaaaattagctgggcatggtggtgcatgcctataatcccagctacttgggaggctgaggcatgataatcacttgaacccaggaaacacaggtttcagtgagctgagattgcaccattgcactccaacctgagtgacagacagagactccgtctcaaaaaaaaaaaaaaatatatatatatatatattgctggtgggaatgtaaaatttttcagccacgcagaaaacagttaggtggctccttaaaaacagttaaacaggataaccatatgacccagcaattccactcctaggtgtatatcccaaaaagctgaaaatagggactccgacagttaattcgtcatcaatgttaatgatggcaggattattcacaatagtcaaaagatggagaaaaccaaaagtccatcaacaaatgaataaataaattctgatatacatctacaatggaatactatttagttaaaagagggaaaggagtactgtatcttcagaatcatgtattagattagactaagattacaaatacgagagagggagtaagttcttcccctaatgattgtgaagcccaaggcaagtatataaaatgagaccctggcctatagcttgcccctttctttccccactcctaattgcttctgctttgtaatgacctcacagacatgcatgtgagctccagcctcactcccaagatccatacacaacccagtccccacccttgcccatccctacaccctgcacacagctgccccttgacctaagtgtgcacacactaaaatcatgttttgccctctgcaagacagactggagaagcaaggccctaagagtggattcggggtaatgtggtcagggaattctggaatcctgggtttgtaaaggatggtctagaagctgaacatgactttgggtgaatatgttccctggggcctgtggactcctcacccagtagagaagaggacacctcggggagagatggtctgggacttttaatgtgcaagttccaggtcaagggttgctctaggctaaaagaaagactagaaggaactatgatttattgagccaggccatggcaggacactttttgtctactacttgattcttattccatctgagaaagtgtcatttgctccattttacacttgtcatgacattgaggtgaattctccagggtcacatagtgagtgagtgtcaataattctaaagtctgtgttctggccgggtgtggtggctcatgcctgtaatcccagaactttgagaggcggaggtaggaggatcacttgaacttaggaagttcaagaccagcctgggcaaacatggagaaacctcgtctctaccaaaaatacaaaaacttagctgggtgtggtggcgcacacctatagtcccagctacttgggaagctgaggtgggagaatctcttgaacccaggaggtagaggttgcagtgagtccagatggcaccactgcactccagcctgggcaacagagcaagactctgcctcaaaaaaaacaaaacaaaacaaaacaaattctgtgttccttttaagagcagttcacaggatgactaaagaaggcatcagaaaatgctaaggacacttctggacagaggtggtgttatttgccgtcagaagtcagtaatgccacatagcatgcttggtaggcttttgttcttgggtttggttgataatgaggaagagtcctttgcaggttgcctctactgctctgctcaggggccacccagatcatgacgtatggtgttcccagcagttcgggttgacagtccaaccgtgagtcacggcaccatcacatctgttcaggaccacacagccttctgtctaaacatttccactcagcacagctgtgcaaaaggtgcccttgcattttttggtaaacaaggcagggtggttgccttggtgtctttccatccctcgcagtctctttggtgattatctacatcacagtccagaagcagagaagcttctgagcaacacagtgagataaactaaaatggaacttttctttgctaatttatttgctacttaagataaaatttcttattctgctgatagtgtctcagtttccttgtttggaaatggggcatgtaggtgctagcttcatatgatgaaggatttaaaatgtgttatcatttttgctttttaaatcatcagtactgttcaggtttggaagagtagaatgaactacctgaggggcagggcgttcctcacaaattgtggatttctgaagagattgtggaagacttggcaagatatggaagatttaagacctggatgatcttttaagtcctgtttagccttgtgactaaattataaacattattcattttaaaggaagataaattgtgttaagtaccataaacagcacagattgggccattataaaagtatggagttaagaagaggttggttccaatgggaaattataggtggcttcatggaagggatggcatttgaattttgactttattttggaaaacacgggaagctatcagttggtttgcttgcttgcttttttaagcaaagaagtaatacaatagtcataaatgctgtttgctgaatatttctgggtccatatcttctggatacatgataagattctgtttcctggacacctgtgagtggggccatgaacaagttctgaccaatgaactgtgagcagcagtgacatcttccacttccaggcaaacattacttatcagtgtgagaccctccagggctgtcttttctctcttctacatcttcggcaatatttcagagagtggttagtccatcagcctgggtcttagagtaaggacaataatgatgtggagctgaatccccagctgccagacaatggacaagttgtgagagtgagaaattaacctctgttgttttaagccactgtaatgttggatttgcctgttcctgcagcatagcctaacctattctgagtgataccaggagcaaggccaggcttgtacttcaggagtgttatgcttactgtggtgtgcaaaataggcttccttaggagagaatagaggcaggaagaatggttagcagagggtgcagtagaccaagcaagagataatgggcacatgagggaaggcagtggccaggaagatggaggacaggtacagtggttttcaaaaagcaggttttcaaaggtaactttgaaaaacgaagagtcacggagcctggcaaacaattagattgatatgaagacacattgttgacaactttcagagtcccactctggtgcaaaaggcatgattacctagaaatgtccctgggaactcattcttggtggcctggacagttgcctctttgggatcaaagacctctgcttttcccagcaggaggggctgcacccaaattcagcttctgatgggacctggcaggaggccttttctacataagggggtctctttctgaactcagccttctgtgattccaaggtttgcaggtgtcagatacttggctctttcacataactcctgtaaacatctaaacccactggcatatgaaagccagacagcctggcacccatacaatccactgttcccctacgcaagtatgcttcaatatgtgacctttaaaaacgaaacatgcaccccatgacaaattttgcaggatatcctggctttcatatgtctctcctaggaaaagcatgagactggccttttggctttctactaccgacttttacgttgtaagttttcctttaaaattctgttttgtactccgtgctgtgtctcgagccctgttgcatgttgcctgacaggtgtgacaacaaaaggactcgttgtgtgcagtaaccatggctgcggaattacagttccactcctctgactatggatatggaagaacaggcctgcagagggcctgatggatgtggcctggcccccgactcaaaaaggaaagccgagggctgtgtgcagtggttcatgcctgtaatcccagcactctgggaggccaaggtgggtggatcacctgaggtcaggagtttgagaccagcctggccaacatggcaaaactctgtctctactaaaaatacaaaaaaattagccgggcatggtggcacgcacctgtagtcccagctacttgggaggctgaggcaggagaatcgattgaacctgggaggcagagcttgcagtgagctgagatcgcgccactgcactccagcctgggggacagagcaagactctgtctcaaaaaaaaaaaaaaaaaaaggaggactcctccaggatgggtactcaaccttaacgaaattatttgacagaattcaataaatcagcattttttgagaagagattcaacattcttccaaatgatcaatttgcacatctccacttttcaactccagccattgaacatcttgaggaattctcaaaggatcccaaaacatgtacaacttggcagtgaattgtttgcaggtgtttttcagttggttctttggatttcagggcatgcttgctggataatgcttcaatggcaaccgaagacccagcccagctctctcatgtctcttatccccataccacaactgaagcatggtatgtttgtattaaaaatagtcaaacatgctctagtaatttaatatgtagggtgatatttttgtttgagtttctagttggcatattagtagttgagaaaaacattgaatgagacttttgcagaatggcttaaagtaacttctgggcattttcaaggactttaagaggctgatgacactggttacttgtagtgtctaattttactacaaagtgtaagtcttcctttgcctttcacttgcggtgtcatgtgcacacctcttacggttgtcagtctaagagtggtttggggcttatgtcagaattcatgagtgggaaagaaggaagaagagagattttcctgtggtaaatggagaagatctggagaacaggcaaggatgaagaggactggagaggatgtgtttgtacatgtaaaagagaaattgcttgaggggtgttacctcagtggtatgcagtgtaagaaagtggaaagggagggttatgataactgcaagatcccctgatggggaaagaaaacctcatgtggaaaccagctccagcgccagccatgctggctttcactggggaagccttttgtgtgggagcgtgctgaaggtctgtgcacggtatttgtactccacaggctcttgctagccatagccacagcatggtgtaagcagccagaaatgaagacatccccaggtcttgtcctgactttacttttgctttaattcactcaatgtatctggtgaatccttcagtctgatgaggaaacagcttcccccacctgctgtgtcctgtgcttgcatcacttaccccctctggagagggtggtctgtgtctccaggtaaatgagcttcctaatactgaccccaggattctatggacttccctacactgtcaccagcagggctggtccagtaaaggcctcccacacatccaggactttagtttgcttagtttacactgtgtcaaggacaatggagaacacatattctctgggacagcctggctcaggcaagaagagggaagcaggaaggttcacgagtcatggccctacttctaagaggtccactggcaaagccaccccagttccctgcacccagggaggggtgcagagaagtaggaaaataccacctttttagctgcttacactgaaagcatcatcagaatagagacattttaggtagagaaaaaattccccaagtaacagatatacatacagtagggaaattttttctattctataattgctttatcaattttcatactgggataatatttctctaaactggataggaaataagaggggaaatggaaacaaaacacgtatacagtgatacgggcacctcaatctcagcatgttcttttgtttttttttccaagacagagtctctctctgttgcccaggctggagtacagtggcgcaatctctgttcactgccacctccgcctcctaggttcaagtgattctcctacctcagcctcctgagtagctaggattacaggcacacacgaccgcacctggctaatttttgtattgtttagtagagatggggtttcaccatgttggccaggctggtctcgaactcttagcctcaagtgatctgctcaccttggccttccaaagttctgggattacaggtatgaaccactgcgcccagccctcagcatgttctaatggcaaagaaataactaactgctgattaaattttgctccagtatatgcccagtttccggttgttctaaaaagacataaatgttatttactaatttcatttaaaaggtaatagattatctctgtttgcatggccagttttttttttctgcatgtataaaactgagcaacaaagttcctctaaacagaagtagattgcagccatgatatgatcaataagagaaacttagccacaaagtgtcctcaagcagttagagcataaacctgaaccaatattgtgtgtcggtagcaatttgcttttatttattcatcagcatccccttcaactaaatataagtgtgggcaaagaacagttacagacatggacaggcactcgtttctctagaattattaagaatcactggactgtgaaatatcagtgtttcaaaatttctgatttctcctgtgaggtacttttcatattttattttgataactgaatgcaaatgagcttcagggaaccctttctcacctgtgttctttgcatgctggtacaactgagtctgtttattaaggactattaacaaatacatagcccagtttagaattatacaaatcaactacattaggggagttgccaaaaaaaaaaaaattgaaggtagaaacaaaaccttctttaattgaagctctgttgattttagttttctgtaattattataattgttgggatgttcgatgctaagaacttcaaactaagaatggaaagtttgagttcaggctctacctcttattttattattatgattattttttgagacagggtctcgctgtgtcacccatgttggagtgcagtggcatgatctcagctcactgcaacctccacatcctgggctcaagtgatcatcccacttcagctcccctacctagtagctgggattacaggtgcgctccactatgcctggctaagtttttgtaattttggtagagacggggtttcgtcatattgcccaggctgctctcaaacccctgggctcgagtgatctgctcacctcagcctcccaaagtgctgggattacaggcatgagccaccacaccccagctaccacttattaactcttgaatgtggagcagtcacctcccctgttggccttggtaaaattgggatgagcatccttttcatacctgtcttactggcttactgaggaatttagataacagaatagatgtagtagctcattgtgagattatccaaacatgaaagaatgaacatgactccgtttagaagagcccaggagaacagggacacattacctttgtccagatataatgagctcttaggaaaaaggaaaaatgactttcttcactgtcgtttcagtaattctcatctttataacagccacagccatagttaacagtcatctcattcctcctgtattaggtgcctcatcatcttgtatatatgtaatttgacaagcactgattaagcacctactttgttccatgtaccaagtaccatgtacagagtcaaagaaatgttctcatagtatacaagtagatctaatgaaaggcagaggttgggctgggcgttatggctcatgcctgtaatcccaacactttgggaggccgaggcaggcagatcacttgaggccagagtttgagaccagcctgaccaacatggtgaaaccctgtctctactaaaaatacaataattaactgggcttgctgatgtacacctgtaattgcagctacttgggaggctgaggcataagaattgcttgaaccagggaggcggaggttgcagtgagctgagatcgtgtcactgctctccagcctgggtgacagactctgtctctaaataaataaataaaaataaaaacaaaggcagaagtctaatcggatgacatgggctctctgttgaagagagcttaattcccatggggtgagtttgtgggtgctcttaggaaaggtgagattcaagcaagtctctaaaggacctgacacaaatatatgctaggtatgtcctgatgcaataagcaaaagaatcactttcagcatcatggttagttgaatcagaccctgatcagtgaactggctgcagtcttcttccctcatcttaatgtctgaacatctggggtttagcagagaggggcaacacatagtggacactcagcaaataacgtggaggcaattcatgagcaatgcaatatatttgggagtgcggctggatgggtcagatactggagtaaacagagggtgttcaccttgctccaagaccttggccaggtcatttgtcttcttccctcatcacgatactggacaggaaaatctgatctgccttggaggcttgttagcagtttgctgcctggcaggtctctggctcaagtctgattgccaagtagcaagaataaagcaacttcctgaaagcatgctggggacgataatgaccgtcatatgagatttgaggttggggagagtgtcgtagggagcagccatcactgtcctgtacaggaggactaagctaaacactaatattagaatttttttaaagaaagcgattaaacaaagataattgtctgttgtgtcaaggtaagcttcctagggcacttttctttaagaaggttaattatcttcatagatagctagaatattagggttattaaggaggggggaaagattgttgatgtttaatctgtagttcttcatggcatgctaacgaattgaaaaatataaagctgattggtccaaaggcttggcttggaaagctcactgtggaataacagagagtgaattggccagcctccgaattattgccatgcaaatgtcaagtagccaatgcttcctgttttagtagaggcagtgtccgagaagcaggtagaggcttgagggtgcaatgatggtgattttgggggagtcactgaaagctgcagatggcactgttgagagtgtagcccatgcccacatcctcacccacctgcaggactaattttgtctttgtttttgctgccagtggagtctttcagctaaaagtttcccttgcataaagcgtgatgttttagaagtatggaaagcatctttatatatttggattagtagtacccactttgcaagaaatgctgtttacctctggttatgggaattgaacgtaatggagaaattagaagtgagtaaagcctctttacagctttactgaagctgggccttgggcctttgggaaaagtttgctgctgttctgaaaacaatcactccctcccaccacgtggaggcccactgcagctcttgcagtcactggcagtccggagcttcagcttgtccctgcccctagtacctcttccagcagtggctggtcgccgcctcactcagctgttatcctgcctcatgggttttcctggctggcagctgcaggtcactgctaagtctcagaatgtctcaatttctgcaccaccctgttgtacccacttgtgttggtgctcccctcaagagagaaacagggcaacacagaggaagtttgtaggcaagagcagtttcatgagtgagcagatcatgcaactgatcagagccctgcgctcagaaggccccgctcttgaaatactctttggctccaggaagacttctcagactagatacctcctctgctggttcctactgcagtgtttcaactccataaagcacaaattacattgtaatgtttttatctgcttgcttgtctatcttgtttatttcagaacaggaaacaaattttattcatttctgtgtccttggcacctagcacaatattcaacatgtactacgtgctcattaaatatctggggaatgacaacagaggtccgtaattggttggtggcactggagctggaatcaaaaagtctcccatctctccaccttgggcttggacaactgcatttgaaaatgggttttcaaatgacagcttttatggggatcttcttcttttctgtctcactcgaagtgggtttgtaaactagcaaaattgcacctgccactaaattcttccttgaaagtcaaattgggttcaggtgagctctgcatttctagctgaacaggtactgccacagggtgatgaggactcagcaagaccaaaagaggtttagtgtgaactctgctgggttcgccactggtgcatcagttgcaagcaacagaaccggacaaagaagaaagcacaaggaacagtccagttctggaaggctggaaacggaaaggaggttatggaatatagagaatggtcattcttctcttcctccacatttcttgatttctgcttcatttctcttatttgatagctatgtgacccagggcaggtcacttaaccttgatgaaactcatcaataaaatgagataataacgtctctattgcccacctcatggtgtcttaataggatcaaatttgaaagtgcttgtaaaaatgctttgtaaagttataagatatgatgctcatataaagatctgttattacaaaatatacttacccatgtggctttctatgagactcctttactaaattttaaccaggcttggatatcccaactgaactttactatttagtgtaaaaattgagattttggcagttaggaaaacccagaagtgcctttattgaccttcaaatatgagttctaggatggccttattgttgtctctgggtaggacaaaattatcaactttggtccttgcaccttacagaagttgtctactgcttttccccccacaaactctacttcaaattcaaaacacatttttatgatgttttattctattccaaacataatggacagtgtaaatcttgtttgaaggctcatgaaaaaaaccagacaccaacacaaataattataacccaaggtagaatataagagaaattacaacaatggcttttgacagcttggaagaggagagatgacatctaactaggggactgaggagtgattcatgaagtctaatctctgggtcctgtgattttgggactcaatctttttgataaggcaaaagccctccccaattctccagaaacttgtggaccagtgtagagaacattccttcagcaatctttctttctcagagcctggaaataacactctcagattctcagtcttttcttccttgtgaggcccagagctctgcgcagctcatgtttgagatgattggcctcctagaatcttgcagggtagcccctaggcaagcctcttagattctgttttcttatctgccaaatgcatgtaataatatttactccaaaggaatgtagtaacatttaattgatgtttgcaaaaccttctgagatctacagatgaaagaccttggagacaaacacaacatgatcattaaagaagacttaatcccttcatcagcctttagaagttctctgtttgctcaatctgtaccttctttgagggatcactgtacctcatttccagatgcaaaaaattcttatggaaagagacaagtggtccttgattttctggtcaccctctgggatgttctctgttcaacattatccctagactgacacactctctctcctggattttttttcccattttgcaagcaatggcttgtcttcctcacacctggtcaatgctcaccctgatctcactcaggagacttctgtgagtgagaagacactgacccattagtagtaagtttgttgatttcaaagactcacaaattcctgctctttgagctacaaagaaaacatcatgctcatcttggatgttagtgacagctttttactcccttgaaaaacttatctcccctttctggaatatgatattttttatctcttcattctaaaaatatgatgaatattcttggtctctgactccctggtgggaagagtgaagccccgtcatagattggtcatttcctttggctttatcattgattttccttcttttctattcttagatttttcaactataaaataggataatgatcattgaactatttttctcaaaaggttgtcctgaggagttaatgagaacatgtaaagaaaatcactttgcaaactctaaatgatgtatagacacagctgtgaggtctgatccgtaatgcagacgtcaatggatacagccaatgctcatagacacagatttgtagtgaaagtaaagtcataaagatcagtgtccctgtttccaagtttgctgaaatattctcatctacaaactcttgtctgttgaccatctgacctctgaacatctgcaataatggggaactcaccagctactgacagagtctgtttcatatctggaaacatctcactgttaaaaaatcctccctttggctgagatgacatcagtttcccagcagcttccagaactgatttgtaattcttgttcttgattctacaccaaaaagttatgaaaacccccttccctataatagtccttcagatttgcaaaataaaggattatgtctttgctgggttttcttatgactgattaaaactccccagttttaaaatattttctcatggagctttgtttctcggcctttcaccattacaaaggtaggattggtgatttgcccaacaaatgggggaggcagaggctcccggaccacagtagagcagatgggaatggttggatccctatgtactcaaggttacaaggatcaggatggaaaggacatttttatcaaatagtgccagccagccccatacccagcattgtcagtgcctcacacacagttggagctaaatgaataaatactgccagtgaataaatgcaatgagagctttgttatctataagaggcatctattttattcctccagaacactgtaattttggagtgtctttctataatttttctgctactatatcactatggaggacaaattttactttcttcttaaacactgagatgtattgaattccactgaagtttttcctttgagtctcagattttaggtgcacatgagaaaatgagatatgagggagaacaggaaagtgggtgagatagggtgtcacctaaaatttctcctgctatttgcagctatttcccatactcagtcttatgttgacaaagctttgagctcataacaaaaatgagtttccaaagcattaaaagggggtggggcatgagtcacagatcccagggggagacattggatgtcagtcagtccaatccggcacctgataattgatctcctttacaacaccggattcagatttggttaatatttactgagcagctacagtgtactaggcactctgtaagatgcttttacataaaacctctcattttgtcctcccttctctgcagtgagaaaggtattagagtcccctggcgtcaagaaagagagatttgacaccagcaacactgacctgctgctagtatactcccgatcttctaaggagatgtttcattcattaaatcaagagaagtctatgaagccttcagcaatgattcctaaactgtattctttcaggtctgtggagtttgtaagagctccatatatgcgctcaaggttgtctagagactgcaaaaaatagacatattttactcatatatacttgttttctcaagtgtattgcggatactgttgtgataaatcaaatacaatttttaaaactatgtcactaaaaccacagtttttgtcaccatatattttatcaatcattagaatttttaattaacatactttattttttgagcaattttagttttacagaaaaattgagcagaaagtatagatttctcatacacttccttgtcctacctctctccccagcctcccctattattaactttttggattaatgtggtatatttgttacagttgatgagtcaatattgttgcagtgttattaattcaagtctatagtttacattatggtttactctttgtgttgaatattctacaggttttgataaatgtgtaatgacatgtacccaccattatagcatccactattatagacacagaatagtttcactgccttaaaagtcccctgtactccaccaatttatcccttcctctctcccctgaacacctgatatttttagtgctttcatagttttgccttttccagaatgtaatatagacagtatcatgcagaatgtagcattttcagattggctttaaaaaaattagtggtatgcatgtacgtttcctccatattttttcatggattgctagctcattttttattgctaaataatattccactgtatagatataccacaatttgtttatccattctcctatagaaggacatcttggttgcttccaagttttagtaattatgaataagactgctgtaaacatccatatgcaggttttcgtatggacataagttttcaactcatttgattaaataccaaggaatgtgattggtggattgtatggtaagagtatatttaattttgtaagaaactgccaagctgtctttcaaagtgtctatttcattttgcattcccactaacagagaataagagttactattgctccacatcctcatcagcgtttggttgtcagtttcttgagttatctttattctaataggtaggtgctaatatgtctttgttattttaatttgtaattccccaatgatgtatgatgtgcaacatcttataaatacatattttccatcagtatatcttctttggtgaggtgaatgttcagatattttgcccatttttaaattgcattgtttgtttccttattctggagttctaactgttctttgtatattttgaataaccgtcctttaccagatatgtgttttgcaaatattttctcccagtctgtgatttgtttctttattcttttaatagtgcctttcacagagtagaagtttttagttttaataaagtgtaacttaacaattctttcttttataggctgtgtttttggcattgtttctaggaaatcatcatcaacctcaacgtcatcaagattttctcttatgttatcttctaagagttttatagttttgtgttttgcacttaggtctatgacccattttgaattgatattttgtgaaaggtgtaagttctatgtctagattcactttcttgcatgtagatgtccagttgttctggcaccatttgttgatatgactattgtttctgcattgaattgcctttgctcttttgtcaaagatcagttgatttttcatgtgtgggtctatttctgggctctatattctgttctgttgattttttttcctattcttttgccagtcctactgtcttgattactgtaaccttatagtaagtctttcagttaagatagtgtcaatcctccaaatttgttcttctttaagcttgtattggctgctctgaagcctttggcctttccacataaactttaaaatcggtttgttgatatccacaaagtaacttgctacgattttaactgggattgggttgaatttatagattaatttgagaagaactgacatgttgacaatattgagtttttctagccatgtacatttatttagctctttgatttctttcatcagggttttacagttttccacatatagatcatgtacatattttgttaggtttatacctaagtattcctcttattttagtgctatgtgaaaggttttgtatcagaatttctaaaggataagtagtattaattgggacacctatattttttaggttaaaatgtggtctgcttaatccaaaagatgagaaactgctggctgatgtgatactggacataaagtaactaatggtagggctctgagcttctgctcccagaggggtatctaatggtgtttctgtggcaatgtcgtggtacactaagagagaaatgccatttgcagctcagactctaagaaggaaataacttttacatcttcaagagtttaaaacatgtttcccttgccacatcccacatagagagaaggtgggcagcaacataaaagcctgtgtaaagagtgcaggttagaggaagggagaactatagcattattcgactattctttttctctagcagagtagatacaccgcattgctcttaggacaaagacaaggattctttccaaagcctacaaactgggaatggtctgacctctatcagcctcttaaaccatatgctcacttcctccagggcttggccacgtcggccttacacatcctcttctttgcttttccacagggaaaagtctactttttccacaggggacttgaatctgctggtttttctcctctttagccaacacatgcattacttccttgatcctcccaaaccaggcctcttaaagtgctatatgcttctgagcacttgttgtactatgattttgcatttatttatgtgattagctgattactagaccataagttccacaaggaaaggcagttacatctgtttttttctcaccattatcatctcagtgtcatccctgttgagtgaatcagtgattgattagatatcttacagaattaagagctgtatatatttcttattttagagtatggaggccaaccagttatccaaaagatcctctaggtattatgatacatacagacacttgctatgggtggttctccatccaaacaacacaatcaacattctggtttccagtgaaactagaaaaactaagtcagtggaaactaagtcagtagctttcctcacacatctttgtcgtcgcgaggcttataccagtttggaaaaatttaattttaagagcttatttggcaaacatttactaaatatctactctgtgccacatgctgcgttaaatgagaaccagacataaagtgtctcagccatggtctccatcttggaagactggagttacagtgtgggagggatacctgtcaattccacatcaaactaaatggtcggggtggagtcatagtgagggctgtaagctgatgctctggggccccattcggtcttcctggttttgtttttgttttcgtttctttggctgtacactccttctgaaactttttgacctgaatgacttaggccagtcccgtacattttgttcctttagtcttccaccacgcacttctgtctcatactttgctgggtatttcttgtgtttccactgcctgcttggccccgaagtacatccagttgctgacctttggttggggccaatccttctctggggtcagtggttggccagagagaaactgcttttcacattcctgttttgtgcaaggaactgtgggagacacatataattggatcatgcagggccctgatgtccaagaactcacagtccagtcaagaaagtgacacacactgtctcagagtgtttaccaaagcagctgtgagaagcgactggagcacatgttttgatccctgtgtttgcagctcctgttcatggcatggcaagatcaccatgcaagcccttatcttgtcttcttttagggaaattaactgtggttctgttactgtgtgaccatgggtaaattactgcaacttcagctcattgagctatggtttctacacctataagctggaagtgatattaggggacaaccaggttgttgtgaggtttaaatacacaatgcaggcccggtatggtggctcatgcctgtaatcccagcactttgggaggccgaggccggtggattacgaggtcaggagatcgagtccatcctggctaacatggtgaaaccccgtctctactaaaaatacaaaaacaaaattagcagggcatggtggcgggtgcctgtagtcccagctactccggaggctaaggtgggagaatggcatgaacccgggaggtggagcttgcagtcagctgagatcacgccactgcactccagcctgggcgacagagcaagactccctctcaaaacaaaaacaaaaacaaacaaacaaaaggaatatatatagaaatgcttggcataacattctgtatagaagagataaccaactaatatggagtctgaatcctgctttatggtgaccttcatagaccctgttgcagaatatgttttggcaactctcaggcctacctttcataggaagcctcagcaggggatcgggcaaacctcatccctgcccagccatcagctgcacagaacactctgtgccggcagcaggcctggccatgtgacctcttctccttcttggctgttcccactggcaagctgtgaatagccagagacaccctccataatgctgagaccttttcccaaggagcccagcgggaaaaatgttctgtgtctttgcaaagcctgaccctcttctggggccaattctgctggagatacagagaacctaattgtttcatgtacttcacgtctctctgttggtggccacttaaacccttctttaccataatgaatgaaatgcttcaaagaatcaggatccagcaatctcaatggccccaggagcaccaagacgttcaggttgacagattcagagagtgtcagagcaggaaggcatcttgagcttatttgtccaacctcccccttccccagccaccttatagctgaagaagttgaatgtcaaagagacaaagccacagacagacctagatctcttgccttccaggcctgggcttctgctgtgacaccatcctgctttccgcatgtggaaagaaatattgagtgtggttgtgtgcgtgtgcatggggccccactagtgccagttgtcgcaagtgatagatcagactcagccaaaaaaaaaaaaaaagttcacatggttgggaatgtgggagacaacagattagcttgtacaactgagatgccaggaggacatctggctttggctgtgttcttgggatctggttttgctctctccatcttttagctcttcttcctttatgttacctccattctaacattctcttttctctcaagaagacctccataagtttccagggtgaagtcctttaggataatgtgcagtgggggaagtaggaaagttctctgtcccagccttctctgcaaaaaccctaaggttcgctctgatgaggcttcttctatcacatgccctcttgtgagccaatcacgggggctggtgactgcagtgcactaactgatgtaggcctgagccatgcattccaccccagggctggggacaggtcccactcagacctcgtggactgagagtgagatgcttctagaaaggggaaatggggctctagggccaaagcgtgaaaaatgttctctgcacccctctgggcttctgtgtctgataattagtttcattgtgtattaggtttatcaaattttccatcttcccaaagtaggaaatgctttgacctctagcaaatatgatagtgcaattcttatagtagaaataaactcagaaaagactgcaacatttccctgggtgaggtggagatcctgggctttaggaaacacaccatcccactgttgatcagctaatccaggccttgttctgcatttgcttctattaaataaaaaatgagacatgtaaataaacaaagacaaaatcaagcaaactaaaaaaaactcaaaggcctaatctttcagattgctaagaaattctgattaaacatattccaacataagacataggccattgtagctacgtaaggacgttgcttggtgcttgagaatatgtaagccctcaatgagcaccaatttaacatcttcttatttttatttgtataattttttttgagacagagtctcccccatcccccatcagaccccaccccccaccccgccgttgcccaggctggatggagtgtggtggtgcaatctcagctcactacaacgtctgcctccccggttcaagcgattctcctgcctcagcctccagagtagctgggattacaggtgcacaccaccacaccaggataattcttgtatttttaatagggatgaggttttgccatgttggccaggctagtctcgaactcctgacttgaagtgatctatctgccttggcctcccaaagttctggaatttcaggtgtcagccaccacacccggcctcagtatatcatcttctaaaagtcaggtaagagctacttgcaccatttaagaagcattttcatgacaactactgcacaatctgtatgaaggcagagtgccgcctgtctccattctacagacaggagagtgaggctgggagaggtgagcaacttgccagaggccatgttgtcagtagtagatctgaaaaatcatcccaggcccttcgaccccagagaccttaatctttccagcatattgtggtctccctggagacgtgtcaatactttctattattttccttaaaaggaaacatcatattcaaaaggcaaattaacattaacaatccaaattctttttactatcagactggtaaaagatttaaaaggatcaatgaaatcaaattttaactaggtcataagaaaagatcctctcatatgttgttggtgggtctgaaaattgatacaatatatttggagtcaaatttggcaattatcttttagaataaaaaataatggcattttggcaggtcatggtggctcacgcctctaatcccagcactttgggaggccgaggtgtgcagatcacctgaggtcaggagttcgagacaaacctgaccaacatggtgaaaccccatctctactaaaaatacaaaattagctgggcgtagtggtgggcctctgcagccccagctacttggaaggctgaggcaggagaattgcttgcacccaggaggcggaggttgcagtgagctgagatcgtgccactgcactctagcctgggcgacaagagtgaaactctgtctcaaaaaaaaaaaaaaaaaatggcattttaggggttgtttctaaggaagggcataaaaagtgttcattgcagctttgtttataataaacaaaaaaaatggagaccacctaaatttcccttcataggtgagtggcttaactgtgatctagtgacaccgtggaacaggaggccccactcagggacaccaacactgttaggtctctactgcttgttaaatttttaaattgtagaacaatatatacagcaataggccatttacataaaaaacaaactgcaatatttctatatgcacataaattaattgcatagagtaatggtctaaaatgatatgccaaactaataacagtggaggtggggaggggaagaaggatgagagggtttggagttagtggggaatagggcagagattgaggtcaagattggagcagacaagaggatgcttgcttttaggtatttacagtttttacagtaagaatatattcatattctatttgtataatttaaagtattaaaatgtaacacaagatcttactaaaacatattaagtcatttcaattaatgaatgtcttattagtatctgagtttggaggaaaaaatgctggcttctttcagagttttctgattataacaaatacttatcaagaactgacccaatactaggtagccttcaaccctttgagggatttacagattggtagaacatgaatgctagcagtaaattaggtatcactgatgttcacctatagagagacaggctattgaggaccagagtccacttaccttcctgatttttttccagatgtcacattcgagagtgagatcagggccatgcgcctgggactccatctctcaaagccttaggttttgcctctgtagtgtggagagagtcttagtgtttccttccttgttttcttttaagaatcaagtcagccagtgattatgaaattgctggggagctgtcaaacatgataaaaatgatagaagttgatgtaatttctcctgcttccatttgtctgagcttcaaagtgttgaagtgatttgcacagggacacgcagctacaggacagcttaagctctgtttttgtggtagtcctggtggcactttgcaataacacccgtatcacattgtgcacaaattgtgaatgtgcctgtttcccccactaagcagagttctgtgaagtcagaggccagacactagtcatcttcttatcctagcacctatctagtgcctagaaggccttcagggaacgtgtgttatatatgaaaccttctggactcagctttctcttctctaaacaagaaatataagctagattgctgatatcctttttagctctgagggtctgtgattttaagatctaagttttcacttcaacagcactcattatctctaaccagatgattgacttcctacaaatcctccaaagcttgggaaattcaactggatgagaaggtgaaggattggccagttctttcatgtggagggagtgagggagtttctgtaggaaccttaactgtgatgtccctggctgatgcgggcttggaagtaacaacaccttgtgcttatgcagcctcctgcttctcagcagttcaagtgcttcccagacattatctcactatttctcaccatcttcttcggaaagtggctgaaggcagctcttgttatcataccccggcacaccctgcaccagtgggttaaatggttttcccacaaccttccagtgagagtcaggaccaggacccctgtcaccagacttagctttccagcctgctcattgcctcatgcagctttcaggacccattatttgcctcaaggagaagggaagttcaccatcactgttacaacaatttgagacatttgctggggagccctgggaaaggagaatcctctttccttctccaggcatgtgcagttgatgatgtatataaactgattatagagaaaaatgttaagtatgtgtggctcatcctatggaggaatctgccaatacattcgacatttatggatgtcagggtcaagaatgtggggatattggaagcctggtgcagtggttttaattaacctggtgcatcataggctcagtaggtattgcgcctcagtaatgctactccagagactttcattggaccacccaactcactccttcattctttgataaatgataaaattaatactatagaagcaaaaaaaacaaaaacaaaaacaaaaaacaaacaaacaaaaaaaagaaggactggccttgcagttaggaaatctgggcttcattcaagcattacatactttagtctcacgtgctgttaggaaaattacttgatctgtctattcttcaaattctctattcataaaaatggctaacacctgtcccatcagtttgttttaaagaataagtaagagactatctaagccatatttttacaaatatttgggttacttgatagtaccaggcacacccaaagctatagcatttctgggatatcaacttcaggaaagattttaaggaaatcaactttatcataagataaacatatatttttataaagtagtatgctaaaagtgaataccttttaaaaagaaaacttttcagtttcaccttgcttgaagggtagaggaagagtgatggattttctgcctccagattctacaggatacaatttcacttccctcttccatggggtaccattaagatgactgggtagagacgtgtgagaagtgtttgactaaatcgtccattcctttgatgcttctaaattatgttctggcatcaattttggttatttagatgatattagctcaggttcttgtggcaatgactgcacaactttttttttttttgagacagagtctcgctctgtcacccaggcttgagaacagtggtatgatcttggctcactgcaacctctgcctcccagattcaagcgattctcctgcctcagcctcctgtagctgggattataggcacccaccaccttgcccagctaatttttgtatttttagtagagacagggtttcaccatgttggccaggctggtctcgaactcctgacttcaggtgatccactcctcttggcctcccaaagtgctgggattacacgcgtgagccaccacacctggccaacttttaaaaaaatatcgtgttctcagcttttatttaagtgtcagtataataatttgttatatgtagaatgtttccccattgcctgaaagatcagtgttgaagatctggtcctttatgtgactttgtatccctcatataaggattcaggtgataaaactcttcctcagatcttctgcccagtagaagaaggttgtctcctctgaagaatggataatgacacttttgatcacataatcaaagccgggcaattcatcacttttctgtttttgccatggcagtcaggggggttggtgctattttattcttacatttagtaacaaacatatctgaggttcctgacatgatcacttcctttcttgcatacactgccagatctatatgtttaaccatctggtgcttttattctacgtctttgctaggttttttgtttattttaagaaatagttaaggtatcaattacaaggaaaccattcgttctgaagcaagcctaagaggtactaagactcaaatttaaatgtaaaattaaattccttcagagatgagacctgaggccagcttgtgaaagagcctgggtttgcctgtggggccatcaagcaaacttcccagttagacagttccttcttaggaagcccatagccagttacctgcttcctgttccaccctctaccaccgttagtgaggatctttcctagcctcttgtcttatatctgtcagcccctactccagcatttgcaggccaggtacaagtacaaatgtaggctactggacatacccttgcccattcctggttatgctatataccattggcggcctagcattgatgggtgtaggcaccccctaaagacaaatccttctcagacatttccacccaagtgttctgatggcagggaagggcaagatttggaagcagaacatcaatcacatttcctacccctggaccaccctcttgtcctagggctgtggcccctgggtctgtgatctgctctggggatgaggaaccaggggagaggtgaacaagcacccggaagcaggctttgggccatttgcataggcaatttcaggggcccaaacacccaggttttggtaggaaagggggagatgggttccaggagcacacattcatgtggccccatagactcctacccaatggggaaggccagagctggggcccctgaggcatggagcctagagcagggatggtggttgccagattctactgttatctgacaactctcatgcttagagagactgcctgtgtcatcaaaactgacccaatctgtgtcttcttcagtcatgggatcctggagtattaaagctggaagcgatcatggagagcaactgtctgactcttcattttaaagacagaaatatcagccaggtgtggtggctcacacctgtaatcccagcactttcggaactgaggcgggtagatcgcttgaggtcaggagttcgagaccagcctgacaacatggcgaaaccctgtctctactaaaagtacaaaaattagctaggcatggtggcatgcacctgtagtctcagctattcaggagactgaggcaggagaattgcttgaatcccagaggcagaggttgcagtgagccaaaattttgtcactgcgctccagcctgggggacagtgagactctgtctcaaataaataaatataaataaataaagataggaatattgaggactagagaggcaattaacttgtctcttaaggtgtattctaaatatctgtaccaaatcctcaaagaatgggtttagggtaaggagagaaagacatatttataacatgctgcaatggtgaaagcatggttagatccactaggtttaatatatatgggcttaaaaattcctcgaggttagtgatgaacaaggtgtgagaaatggaagttaggaggagaaaaaaattttctaacttccactgttagagaaagtatttttccccttggatatattgtattcactcaaatgtgctattgcactgcagcgataaaaattaatagctttgtttcctgtgatctctttatcagccaaagcacaggactatggctctcagttattttaatggaaaaactgaagttgtattatcaggtgataaggccgtgtcaggtgttattttattctcttatctcccttgttcaaggtgaggtgttcaagccctgatggatgagcagggctaccgtgactatgatgttctctgagccttgatctaactctgccttttaagataactgtagcaggtaagagaggcctccagggccagctgattcttagcatagatcctgagcatagatccaagggaaggctttgatggttggggtccttgtcccaggacaagtagctcagggactttgcaaattcaatcacatagctcaggttgcctgcactgcagaacctttcatgactccccaggagaatttactcagcaagcactaactgtgatctctgatgttcctactgttatgtttgatagagtgggaaagatgagttatgccagtccctgctgcccttgagaagctcaaagcttgatcacatgggaaggaggcttagtcatatccttctcctcctctggacttccaggacacattatatctatccatgttgtggctcttgtcatggtatgtggtcatttatttgtctgcacaagtattttttctcctaatagaatgaatgctcccctgaagcaaagaccatgtgttagatgtggtctcatgtccatcttcagcaccacagttaaaacactgtcaatgtctgtgcactaaattaatgtgggagcaaattcattggtttgcttgtcagtctgttgcttatttacttccacgataactctacttctaatcaggcctgttactagtatcagaggtttgctgtgagtgccaggacgaaggaaactcctgcctccgttcccacattactaacacaaaggcccctggtttctcattgtttgtcagccaaagtggcagttcaggactggctgtggggcaagagacacccctcggatgatgtgaagcaagtgctggccacccagtgagacaggtggggtctcgactgtcctgacttctgttccttctcagatcccatcactgagcctcagttacttcatctgggaaaggggatttaaaaaaatcctgtcttaactgcttcacaaggaaggttgttaagaaagtcacatgaaaatggatgtgaatggtaaaaactgcacaagagaaagagaagattattaggaagtaataataatagaagtggctccctcttcaccttgcccaagggttcttcatgtgcctttggtaaaggattccaactcatgtgtgccctgccttcctcttggtatgtcaaataattatttctctacttttttcattacagacactctggaggagaggcttggtaagcagtgggaccagatccccaaactgccttcacatgacagcatccacatttcaccaggggcccatgagcagctcagggaagagtgcatccccagtgagggcttcactcaagagccagcagaagtcctttagtcctgcatgactcagccttgggggaggctcatcctcatcttaaaatcaagggatatgtagaagcaaggtgagtctcaggaagctatccagataaaagactgaatcaatcaaaatagaattccagaatcctctcactcctgctggatagaattgaaataagcatggtatctcatttcagctccagggtcagggccctggagcctaggatcctgagaatgactctgcaggagtgatcttggacaagtcattgatgtcctcaggtttccaggcccttctctgtcaaatgggcaggctgattaattcccaaagtccctgctactttgactttgtgactctgtgatatcgcatgaatgctttatgatggctggatgctctgagtgaatctacaggcaggtagcccttgtcctgtgatcccctaatatatctctggatcgcctgcaccctgtctccctccacatgaggccctacacatccatttgtagggcctggggacccaatagcagctgtctgactcctccagggcctggtcctgttttggcattgatccctgttggttttaagctgccatacactggaccaggaggcagagtgcggttgtagtgtagctcagctacaactgacttaagctgtcaaggcccaacttcagtgaacgctcttttatgaagccttccccagttctcatccagaagattctctctcctctggactctcgtggcacattccctgtagtcctctaaaggcccttagctcttcctatgtggctttataattaaaaccatgtcctccttttagtttcctagttttgacagaagatgaagaaacttagttgagtaactcgctggaccttaaaatgcaagtctcgggaggccttcaaagcaaggatccagttgagataatgaagcaattaggcatttgtgaaagtctttgaccttagtttcctagaaggaggacatggttaatcctaaggccacataggaagaggatcgtgaggattgtaggggcaggcagagtattctgttttcccgtagatcctgcgcagggttttgtacatgttaggggcccaagaaatatgaatccgtgacctgaggaattcaagtttgagacttgaactggatatggatgtagattgtccagatctaacaaatacattcctatgatctccttggtgcttggctagtgatcctaagctcaaggatctgtttaggtagtaatggggtgaaggggggatttgatagaattattttggttgtaagttgtgaaagaccaagtgaaattggcttcagaaaaaaaaaaaaaaaaaacagaggatgggaggagtattattaaaggcaaagctggcttctggttagacaacctaggagctactgtcagcttttgctctccaaccatcatctttgcctcattctgtgtcagctctatactcaggcccatctctcctgctcgcaatatggctggcaacaaccccagggaaaagaatatatcatttcatctctaacttttttaggagtgctaggcttgtctctccaaggtcattattaattaacagtccttacagccaaaggagaattctctcattggctctggccatatgtccatctctgaagctggctgaggtcaagggactgggagaggaggtgttatctaaaaacaaagaggacgctgtcaccagaagaaagagaatcaatgcttgtggcaaaaccaacagggcggaccttaaaaatatcttatagagtttcaaaaagcctaacagaaatagtctacttactaatgttaaagctgtacaagttaatgaacatgtcaagtttctttgcctttgtctgaaattatgtcagctcagttagcaaacactggatatcttttgttgaccagaaactctttgcctcataaagaacagaaagagaaattaatttcttgcatgctccatttaacagcattgaatcattataatcttaacttctatgacacttttttctttgaaacatatatcatatcataatatcatatggtaaatagtttcatctgagattggagggctagtgtatattctcagccaatgacagctgaataaacttgactgtgctttctcagccaaagattattgacacttccctacatggtaggcggctttcggccaagaagcattccattgtacttcaagaattgcaagtctttggcaatatgtgtttttccccttgtggaccctccctttctgccatatattttgtgttctggtcagtagctttaccctctacacctgacaaagtgtatggaagtataagttttgaaggaagatgaagaaatacagttgagtaacttgatggacctgaaaatgcaaggctccaggggccttcaaagcaaaggtccagagttgagatacagaagcaatgaggcatttgtgaaagtctttgaccttagcgagggcctggtgagcacactggagcccagtaaggaatttttggataaattccaaaatttatccaaaaggaaggttggataattatatgtaggagaagccttggccagggcaggtcatagttttaggggattggaaagaatcagaagatccactgtctagaggagccagaggctaggaaggggctccttcaccagccaagctgtaacagttgggtctccaattttaacatttacaaatgttaacgagaaattctataattgctttatgtaatcatcagaatatcttaggcaagggagaaaaaaaaaacaacaaaaaaccaaaaccaaaaacatttcctctgccttgagttctaaattttaaggcgctcactctctttttatgttttgttttgttttgttttgttctgggtagttcaattcgattaatctgaaacatcatcctgtagtgggcttgagggaggggatgtgatggattctagatatgaggaacacacaaggttcaaaggaaccggctctcgctagacatccctgctgggaacagatgatgggttggggaagcaccatctgaggctctgtagttttgaacagggctgggagaagaggagcgcatgttatggacagcacccagtgggtagtgtacagtgaggaggagctggcagtaagttccggagcccttccacacttcacactgagctctgtatgaaagagtccctgtatttcagtgtgaaaggaaaatattgtgggtcaccaaaatcgctaagctaaagagaaaattcgagctaggaaattaggcaaacctgcctcccattctattcaaaggcattcctctgttcactgtgataaatgcatatctgattgcctctttggaaagactaatcagaaattcaaaagaatgcaaccttttgtctctcacctatttgtgacctggaagccgcctacctgcttcaaaatgtcctgcttttgcttctgagttttcccatctatctgaccgagccaatgttcatattacatatgttgattgaaatctcatgtctccctaaaatgtataaaaccaaactgtgctccgaccaccttaggcacatgtggtcaggaccttctgaggctgtgtcatgagtgctcatcctcaacgctggcaaaataaactttctaaattaactgagacctcgctggttgtggtggctcatacctgtaatcccagcaatgtgggaggctgagacaggtggatcacttgagatcaggctagcctggccaacatggtgaaaccccgtctctactaaaaacacaaaattagccaggcatggtggtgggtgcctgtaatcccagctactcaggaggctaaggcaggataatcatttgaaccgaggaggcagagcctgcagtgagccaagatcgtggcactgcactccagcctgggcaacagagtgagactccgtcttaaaacataaataaaataaagtaaattaactgagacctgtctcaaattttcggggtttacatgagttacatgcttctgtaagtacgtgacttgtttgggctaccaaggcaacccagaggcaagattggaatcctgccagttcccaagtcatatcatctccattgcccgaatcaggaagagaccttagagatgatcctggttcatattcctcatttcacacgtgtagaaattgagatccagagaaaagaggaagatttacgtaggctggccaaggttttggtatggttgttccaccatctagttgtgtcaggatgagccgagagtacttgttaaagtgttgattcttggaagctattccaaacctatgaaattagatgctctggaaatgggcccagaaatctatattgtagtaagtaccccctgaggtgattcccagacaccccaagtttgaggacaactggcctaagtttccaaaggtgcttcatagttgaccctgcagaagggctttcactccaggctcagcgctcgctctctctggccccagagacctgcaggagctggtgactctggagaatacagatccggaagggtaaatcagggagtgaggttcgttttttagttctcctgcaatttgagaggccttgttgcattttttttttaagactagttctaaaggaattgggcaaatgattcctgtttgcctgtcaagcaccatgatgtttaaatgtatctctgtcttgaaacactgttactctctaaattccaactgatcatttgacagttgaaaaagctagcataaaccactttctttccttttttaagttaatagctgcactccagtctctaacgcttcatgtgtaacagtttaaaagattggcatgcttccctctatggctttcccatctcatacaaactttaagttgctgaaaatcacaagtgatcgtctctgaatcctaactatagacattaaaatgagaaaaaatagttcttctggttgttttgaaaatgatataactctttcctgatagttaaaataacatttacctcttcttataagttggtctgggttgtcttactattttattatgtgacagcttctaacattttaagccgattccttcaagttgtcctaaaacctcagtatcactagagattacttgctaaaactttatttttcaatgattaaaaagtaaacaaatagaccaggtgcagtgactcacacctgtagtcctagcactttgggacgccaaggcgggtggatcacgaggtcaggagttcaagaccagcctggccaagatggtgaaaccccgtgtctactaaaaatacaaaaattagccctgcgtggtggcacgcgcctgtaatcctggcaacacaggaggctgtggcaggataattgcttgaacccaagagtcagaggttgcagtgagctgagattgtgccattgcactccagcctggggtaaaaagagaaaaactctgtcttttaaaaaaaaaaaattaaacaaatagatcatcaagttatttatgacgattaaacaaaaggacacaataggttttctcttaaaaatcagcttgtatatgtatgcttctatggaatatttgtctgggcttcaggacagggatctcctgctacccctgctgtgtgaacttggataaggcaccagcctttctggcctcagtttccccatctacagaacaagagagagacatacaagtgatttttgaagacctctccagctctcaaagttatcagggtaaagtatcaagaggttatgaaacgtctcacactgtgggagggaacaaatatgtcatgattttgttccagtttaatctgtttcacatttagtatagtccaacctgtgataggtcctctgtggaacatagatgactcacttcctgtcctaagtgggtcttctctgaggtatggaacagatccttccttcagatatggagccagcagggggggtcaatgggcctctgggcaaattcttcgtgttctttatctgtgtcaaattaaacctgctaatcagcatacacctatgcccaagggcatgtaaggacagtgcagcttagaaactagatgttcctgaaaagtgtgcccatcaagtttttataaacatgatcacattttaaatgtagaagagtagttggcaactgaaatggagattagggtaaacctttttgtaagatgacaaatgccttttgttaagtaatattgaaggctgaaaagcccagtgtatctaccacttcttccagggagtctccccagcctgctgctggatcctggcaacttcattcatctccttcccctctaaattccactctactttaagagctgagcccacatcagtaagtacaaaattatgctcttgaaaccacagggtcctaaaatgttaaggccagaagggaactttgaaacatcaatctctttaccctacctttatcacccactcatttgtgtattcattaatttatttatttaacaaatatttagttaatgcctactgtgtgttaaacattgggctaggcataacacatacagcaaaatcaaggcatagaaatctcctaccctcatggaatttacattttctctctgtgtgtaaaggtaaacagtgtatatgttggttggctgatggaatggggaattactggttgggaatggagagctactttagattggtgggcagaggaggtttctgtgaggaggtgacatttaagctggcatctgaagaatgagaaggagccagccagggcaactgcttagggtggagagaaagagtaactggtggagactgagtgacggggaagaactgggagagcctagagaacttgagaggggtagaaaaggggtagcgaggtgcaggtgcagacaaaggcagaaaggagggcagggatcatatcagagagggctttgaggccatggtgtggaattggtattttctgctgagtttagtgggaagccattggatggcaaagagcaggggagtaaaatctgatttatattcttgaaagatccttttggctgctttttggaaaagtgattgtaaggaaatgagaaagaaagcagaaaaaatgttctagaggagctttaatgggactattttagactagggttgttgcagtggggtgcagagatgtgcacaattaattttgggggtggactcacaagacttgtttctggtgatagggggtaactggatagggggttaagaaataggaaggaatgaaagataattctttatctttaagcttgagaactgggggaagggttgtttattaagataaaaagattggggaaatacagtacagctttgagagaaaatccaagaaacctgttttggatgtagtaagtttcatattcttattgggccctcgagtagagatgttggatagatcactgattcttctcaaaaggccttctgattattgcaaaggttttagctttgtctcctgatctagaccaaaattctcctgaagataggcaaagcttatgttttatatgtcttcttcttcattgacttcagggtgagaggaaagtaacacaatttttatactcccatattctggattaaataggcttggtgtgctgagtctgctgtatcggcttgcaagagctaattgctaagattccagaaatgctacaagccagttgtaaaagcatccttgaattcggtcatggtggagtacttacacacaaaatttggcaaactataaattggggattttttttttcttagtgagcctggttaccagcgtatcagagtaatgcacagagccaccaactcaaatgcccttaggagaaaggaagataacatttattagtgattcatctaggacatttctcccattgaaataccaaagcatactgggccctagctaggctaaattaaatacctacattgcattaagttcagaaacttaaatttctcaatcaagtacacacacacacacacacacacatacaattacaaaacattcaattccccccttaacatccctaacagaaaattttaaatttgtatgattgtttcccctgaattcaaatagtgcacctcaagataaaatcaaacattcatgtctaaataggaaaggtatattccctctaaaagactaaagttctaagatgttagttgtcattgtcaagattccaactcagcgttgctagatcttatgcattttcaagaaaagccagaaatctgggttttaatgagaaacttcccagctgttaaatgttgacttaaaattttaaaaagcaccataagccaaacaaaacacctgtgtaggcttcactgggcccaagggtcaccagtttgcaagtctatttgaagttcttgtgcgtggttatccatctaaggtgggggagaaggccccccagaatatgccagaaatggacttccctgccaactttggcgtgtgggagccacatgaaatcattttattaaaaaatacgtgttaggtgacttatgctatactctagcacaacggggcaagtacacaacagctgtgtttatttttcccatttgactgcaggctcctctagggcaagggccattactgaatcttggtgtcccactagtatgtaatatgaaagacagcaaataggagcttggtatggaaggagatgtaaacacatcttttcaaatctcttgaagaactagacactcaaagagaagtcacttgctgttggcctcaatagtgaattagtgcagagctggcactagaacccatatctctaaatgattgctcctagggatagaagggacctgtgtttttcaggaaatatttgctgaattaatgagtccaaggaagaattacagcaaaatcaatgaatgtacgaacgagtgaatacaacctgcaatgaccatttggtttatggaatacattttttagtaagaattatgtgaattgggaactgattctggttcttccactaactgtcatattgctataagtatgtcccttatccttacaggtcttttactttcttatctgtaaacactttgtctctgctggtgttctaaaaatcacaaagtaatagctatagtcaaaattatgaaattctacatgatttacgtggattttgtcattaaggcttacaatggttctatgagctgaacactgtttttattttattatttatttattttctgagacagagtcttgctctattgcccaggctggagtacagtggtgcaatctcagctcactgcaacctccaccttccaggttcaagtgattctcctgcctcagcctcccgagtagcttggattacaggcatgcaccaccatgcctggctaatttttgtatttttagtggacaaggggttttaccatgctggccaggctgcttggccagcctgtttttatactgctgtgccatacataaagaaattgatgcacaataacgtaattaaattgttcaacttcatataacagtggatttgaatgcaggcattctgctctggaatcataataagaatgaaagtgctatagagaaataaaaagatgacataaatctgtgatcagaacagttttgggagtgtcacgaatgtggtgtttctatggcttttgaaaagagtgatgctctaggtcaggcgtgttggctcacgcctgtaatcccagcactttgggaggctgaggcgggcggatcacctgagatcaggagttagagaccagcctggccaacatggtggaaccctgtctctactgaaaatattttttaaaaaagaaagaaagacagaaagaaaaaaaattagctgggcgtggtggcacatgcctgtaatcccagctactcaggaggctgaggcaggagaattgcttgaacccaggaggcggaggttgcagtgagccgagattgcaccattgcattctagcctggatgacagacagagactccgtcccaaaacaaacaaacaaaacaaataaacaaacaaaaaatcaatttattactgtatgtcttggaaagtttcctacacttgcaggggcctttggactcagtgacatcaatgaatgtcatggagtcattattttgccttgtagtttcagctactttgacaaagacaaatatatacagcagtaatctttgcacagttaataaattaagaaataaattatcaggctttgagcaaattttcccagagttgtattaatttatgaggagccaacaaattaggcatcttggttaatgcctttgatttagctaaacactcctggtttgtactggaaagggtgaccagcctttttgactcttttagctggcataggtagttacttgtgctaattagcaggaaaaggagcagaaggcaaataagaggcacaaaatatcctccagcaagaggtaatgatggtgcttctcctgggctctgactcctatgacattaagggacagaaaaggacttgatcaaacccctactcaaatctacatgtgcagtttggatactcatagattgctagagctggaagcattttaaaacattgcctaatacaattcttttatttaatagataaggaaactgaggccagacagggaaaacatcttggtcacgattgtgctgcaaaggagtagttgaaccagaactcaaaccaaaaggtcgttgctcactttttgagtgaccattcctgcatagcaagccctttttggttttgccctcaggactctggtaaacatttgaattatgggagtttgaccattaggaaacttcattttagtcttctctggaagttcagggaggagaaataagttgtggctgttgcaatgccttagatttaaatacctttcactctcatttctccaagctaagggaaggaagaaatagcctgaggtttctcaacattagaaaatcaaaaagtaatctgtctttgaaaaggtgtatagggatatagattacgcttactttcctaggtatatttatgttagctaatattgaaagattgctaaaggaggggtttgggaatctaaatcccacttgaatcttggtcttgatgaataaccttgggcaagatattctttctgggttttagttttctcatttgcaaatttcgttgattcttaagaccttggccagctttaagtttcaagatgtccgcctagataacagagagaggctctctaaaagaaaaaaaaatgtttattcagaaatagggtatttcaatgggaatacgcatgccgtagtattcttggctacacagatcagtaaaaagggtggtgccagtttaaagatagacaggcagttactgggcagattccttgcaaaaatattgtgtgtgtgtgtgtatgtgtgtgtgtgtgtgtgtgtgtgtgtgtaagattacatttatgcaagattgtagtttttgcagtcttttgtgatagttcttgttatcaggcattcatgcatgagaaccgtttcttcatggcctttcttaattctattttcagggttcttaacacaagtgattccattttgattctgacaacattcacagcatgtctagaaaacacctgtactttgagtatcattgccatggaagaagaagtaactttctggatggaagttggccttcataaagccgggctatatttgcaaattaagtgcttcccttattaacatggtccaatggaacaagcatgggcccacgagtccagacagggctgtttctctttgatccatgaccctgggcaagtccttgacttcctttaaacctttttctttttaatctctaaagtgagattaacacctgcccatgtttgcctcccaggactgttgcagaagacaaaggatatagaaatactttgtaatacgcagacatatgaagttatgtgtaacttagttttgcgtgtgtccttaacgactaagaaaaacgtaaaaacaacatgtagaaccagtcacaagttcagtgtggctaaagtgatactgaagaaactaaactttctttttctcaaggtcgttttgctttcctagtaatagcccagcttgaaatggggctttggggcttactaaggtgttcatatgtcctggcttggctgggacagtcctatttgcagtagtcatcctggtatactttttaattataattttttttttttttttttttttttttgagatggagtctcacttctgtcttcaggctggaatgcagtggcacaatctgggctcactgcaacctctgcctccaggtttcaagtgattctcctgtgtcagcctcccaagtagctgggattacaggcgtgtgcctccacgcccagctaatttttgtatttttggtagagatgcggtttcaccatgttggccaggatggtctcgatctcttgatttcgtgatccacctgcctcggcctcccaaagtgctgggattacaggtgtgagccaccgctcctggcctcatattttcattcttaaaagtgtccctgttttgacagtaaatttcgtggccacccctaaacttaaataccattctgtttcaccttttcattatacataatggggaatagaggctcagtgaagagaaacaacttcccaaattcactcagcctgcccagagcctgcaagtggaaaatcccttctctttgtacctaggaaggaaggggaagagaatacagggtgacagaatggttccctttgtctgctctccagcgtcttgaagcaaatctaataggagtgccctaactcctctcgatttcctggaaagtgatcagcaatagtatggttgccagtggccatgagggagctagggtttggagcaaacattacaggaagctggagagggaagctttttctcttctgtacccagaagaacagcccaaagggaggaacactgcctatgattaactagctcttatttaggcacagtatttttttggttgatgtcataacgtaccttcactttcatggtctcagttgatctaattcttactgtctttggaaaagaatgtgaaggtatcatcgttcccattttgtagtggagaaaatcgaggccgataaagacttgctttaagtttcacagtaagtatcagagttggtactagagcttcatctcctatgtccttgcccagtattacttaggcttcattttgcttcctgaacagtctgcccttaggcatctaacacagaaatctcattataataaagtatttttagtattcatgtaacttaagccttttggatggagcccaaggcagaaccatcttatatcctgaatttggctctgtggcaaatagtgttagaacatggttcatgatcaactatgggtttcgctttacaaacatatctctgaaaaacttccctatgtggacggagaacaggctaatttatcttgggataggagatttctctttgaaacagttgctgggatcctggagaatagagggacagtcttactatagtacttaaccgtgctgagcttgcaaatccctaacctgatatttttgcagaatctccaattcagaaagatttgttttggcagagactgaaattctttatttggaacttgaggtatccctgacccataagcattcggcttgacagatacgcagttgcatccgtcatcactctgccctaagcagggcaatggctgtggtgagcaagagtaggggatcccgggtatggtcttgagtttgtggctaacacatgagatgtggggaaagctgcttttcttttagggggctcagttgtttcaactgtcatatgttgagacagcattaatcagtgggcttcaaacttttaaagccaccagatttttccccccagaatgctgtgggaacctagcatgaataaatagtaaaagtgggactcacagcttctccatttagccactgtatgtctgtagggcctctgtggactctagtatggcaacattcggatacataccttttagcccccaacactgggattctaaagatgagtaatggcttagtgatagatgttaacctcctgaggggttgcagtgagcctggaattctggatacagaactggtcagacagggaaaagggctgtaacagtgtgacaaacagtagaattagagtggagggtagcaagataaagttttacatttcatgggttaacagcactttatagtttacaagtatttgcactatagttgtctcttttgaacttacgcaacactgtgtgctcaggcatttgtgcagcaatcttttgtgaagctggattatgtgcctggtactgtgggttgagctcatggacataaagaaagaggagagcatgtgagcctggaggagctcatcatcttatagaggaaacaggcaggtaaagaaatcattgcaattgcaaaacagaaaagctgtaagagaggtgcaaacaaatgttgagcagcgaagtgaaagcaatgattcctttttcctggggaggggaggaaggcatacctaccgtggggcctgcaggatgagtgacctaggcagataaatacctaggtagagaaaaacacgtgcacgaagcagtggaggcctgtgtgagcaaggtgcgtttgggggaaacaggaagagctaggggaaatctggccttcaaggtatggaaaggcagttaaacagtgaagttaacctgcagcttaactgggaaggactttgaatacaatgcaaagaatttggaccccatggccattagagccccatcttccagatgaggaaaagggccttcccttcgcacagggacagccgaaactgtgactcccacgttccttttgctaccctgtgctgcctccagcaggcctgaaccgaggcaggccctgcgtgggagaggcctctgggctgtttatcctgcgccagtggggctagctctggcagggagtggaagtaggtgaggtgggggctgtggaggagaggaggagcctgacaacaagggctacattcaaggcctgcactggagctgacgaggagaatggaaagctacagtctgttggagccatccagccttggcaaagcggtcggggccttataaggaaatgttgttctctcccagccggtggggctgggatggagccctgtgcccacaggacagagctgcccttgtggtggtaggctgggggtgccacccgcccctctgctgtgagcaggagctgtcaatgggccacttctgcaggctcagcattccctctcagccccagtgtgcgtgtagcccccacccctccaccccctcccactccccattgccttgggctgattggaggaaaggaaaaaaacaaaacaaaacaaagacttggcaaagtcccaggcctcattgctgtttgatgccgaattattcggaaaataggctcaggtcaaattctctctttttcctgaagaatgcatgaataaggggattgctctttgtcctccttccctgcctggcgcccgcatctcttttccttgtgatcacgaaactcccagcaccccacacggcccagtgcagaaagcaagaagctgagatgagtgggcgggggaagccttgtgctggtgccttttccacctcccaagggtagagcagcagccaccggaatactcataggagaagggtgactctcggactccttacctgtgccgggcagaccagagggccagggagagagagatgggcacagggtaaaaacacagcctgcccagaaagcaacagaaagtgctccttggggtgggcgcggtggctcacgcctgtaatcccagcactttgggagtccaaggagggtggatcacgaggtcaggagttggagaccagtctgaccaacatggtgaaaccccgtctctactaaaaatacaaaaattagttgggcgtagtagtgtgtgcctgtaatcccagctactcaggaggctgaggcaggagaattgcttgaactcgggaggcagaggttgcagtgagcccagatcgcgccactgcactccagcctgggtgacagagcaacaatctgtctaaaaaaaaaaaaaaaaagtgctccttgggaaaggacagtaagcattagtcagctcctggaaggagggcttttctacagggagtgaggagagatgatttaaagcactgatccctagcagatctttctgaactcaagattggggataggagcagaaaagatgcttagtgtggccttttgctttggctattcatagaccccgtgcatgaaaccctggagctacaaggaagcaggttggccagtgcagctcctcacctaaagctgaaatatttttacagcaagcttggcagaccttcagctaaccagtgctcctctagtcatcatggacttagttcctcaagttagtctgtcccaaacatacagctcaacccaacaaggagaagtaagtcatggaaagcaagaggaaacttccgtttccaaggagtttaccatccagagcaaagctacaaggagcacacaataatccaaacacaaagaagaaagttatggccaggtgtggtggctcacgactgtaatcccagcactttggggggctgaggtgggtggatcacctgaggtcaggagtttgagaccagcctagccaacatggtgaaaacctgtctctactaaaaatacaaaaattagccaggcgtggtggcgggcacctgtactcccagctactcaggaggctgaggcaggagaattgcctgaacctgggaggcagaggttgtagtgagctgagattgtgccactgtgctccagcctgggggagagagtgagactttgtcaaaaaaaaggaaagaaagaaaaaaaaaggaaagaaaaaaggaaggaaggaagaaaggaaggaaagaaagaaagaaaagaaaggaaataaaaaagaaagttatgagctctaagaaaaacagagatgtctgaggtgaaagaaattgctcttgactaggtgtccacagcagtagatgaggaaagctcttatagaagagatggaatttggggtgaagaaaagttaaaagtccaaaaagtgacattttgagagattgtagggaaatggcttccagggggaggaactagcctgagcaggacgtggtggcaggaaatcttggggctcacttggtgtctgtggggagatggacaagtggattagtgcaacagggagaggaggggctgtggttggagaatggctgagcaccacatttgggggcactgaatcccagagggaggaggaaattgaagtgattggcagccaggagccaccgaaagcttttaagcgtgaaagagatgtgaccggtacagtggttcagcaactgtgatctggtatcaggcgcagaagggagaggcatccttcgccctgctttggtgaagccaggaaagtaccacttcctgcagcagagctttggcggtgttgtggccctttcctgagcactggaggcctggctctccagacagccacctagatctcaggatttcaagcactgctgcatcttagaggctggctgctttttgaacgagtgacccttccccagaaaggactaggactggccacgttagctcagttctctttttactttgaggcttgcacaagtcattgtgttcagatatggttaagaaacctaaacttcaatcccttttcaggacttggagacctggcaggtttccaaaaagcacccagggttgaaaggcaaaagctctcggatgccatcttatctcaaagagtctgtcctttgtaaggcattcactatttagacacctgtgcttgtctcacacctgatgataatagagcagtaacttcctccccagcttttccctccatggcttctttcccttccttttggatgcctgcctccatcaaggcatcactattcctagggagtatgaggcttttgcagagtgctttgggctcctgttgcaaagagagcaggcatagctttttgtcccagagacaaatccaaggtgctctggaggatagcagtgagttcctgtctgtgttctggatctgggttctggccagtcttgctgtcccactgcccagcatggccagttcagcaatagaattctgagggacctgaacttgatcttcacacctggcccctgcctcctagccacagggcgctgcagctgaggagctgatcatgtgcgtcttggtagcaaatcctgcttcctaccaaacttttcttccttgacaatgcagacagtgacccctgggaccacagagatacagttctagtcctggagaaactggttgttcccctgtccttccaataggttgtggttatggctaattttgaatttgtattagataacaataaatttacttcttcccttttaagggaatatatgagcattttatgatgagatattatctttttttgtttgtttgttttttgtttttttgagacagagtctcactctgccacccaggcaggaatgcaatggcgtgatctcggctcactgcaacctcaccttccaggttcaagggattctcctgcctcagcttcccaagtaactgggattacagtcatgcgccaccacactcagctaatttttgtatttttagtagagatggggtttcatcatgtttgtcgggctggtctcacacttctgacttcaagtgatccacctgcctcggcctcccaaagtgttgggattacaggcatgagccaccatgcccagccaagtgaaatattatcttaactcttaagactgcatttcagaataactgacttatatgatggctggcattctgttatgtgaagcaaaattcttctcaggaccctttgatttaccacccaaattgtctgctagctagctcagtctccaactcagagaaatgtcactggcaaatctcctcagtttttcattttaattttacctaaccattcattattcaccccatttatttgatttggtaataagcagtttaaaataatcacaaggtataaagggaatacaataaaaatgttcctctcaacctttccccaactatctagatgtcctccttttcaaagccgaccactataccattttcttatgtatccttctcctctgcgatgtttttatacaagtaatgatcaggactttcctcatccagtagacagctcatgcaaaaagaagcaagcctgttcaaacagaattctccagggacagtttgtctcccaggtttgcctatacagggagcagaaccctgattctagatgccagatagaactcacctggcccaggtttctatagcacaagccctgatattctttagcctgaccctcaatgaaaattagctgaggacgcctgagctcactctctggaatgagacctaaataccatctcctgcataatcttatagaaaatgaatgaaacagagactgcactgtgagttctggtgccaattataaaggatctggggcagggatctggcatccaggtggctagaggaagagtcctggagtttttagcatcctcccctctgggtcccatttctctggtttttcatggtgtgatctggactgaaatgcccatcagttattctagaccccgacttactgatcacagagaatctttaatctgtgcttgtttactctgaaactggcatctccactagtgctgcagctgctcaccagacacaccagagcactctttcttgctgatgatgctggagcactttgttgctcactgatcatgctggagctctatgttgctcacccatcatcctggagcactctcttgctcattgatgatactggagcactctgttgctccctaatcatactgaagctccattttctcagtgaggatcagaattcatcatccctggctgctctagttcccacatcctggttgctgggaagggttttaaaacctcttacatggaaagagtcccttcttcctgattagagtccaaactgaaaatggatcctctatttgcaagcaccacgacacttccagtgcagcattagtaaatacctcccaagcaacagcagcctggcacattattgtttagccacctcctgcccgatatcatgtgggtttcacttatagaaggttctacaaggtaagggaggtagaaacaagtcagcacaaacagaattataaatatctttatagtgacagatatatgaaatctaattgggtggggaaaacagatgcagataaacagctggataagaatgcaggtttgaacctagtgaaatacaaagaggatgatataaaagataatattaaagaaaaagctgcctgtaggtattctaccttttgcaatatttttttattttccatagtcccatctgtcttcttgtccatatacaatgcacatttttacatagttgcagtcatgtcacaaatactatttagggttctgtgttttcgcttaatattacatgaatttgccgtattgctccaatctttcttttatggctgcagaaatgccattgtggtgattcacaccaagtttcttgccttttacctattgttggaattttatgtctccagctgcttagcattatggataattttgtaaagattatcttaggatattcagctttgtgcttttgttgattttcttaggatcaaaatccaggagggaactgatttgtaaaggggtatgaggaacaacattccctctggtacaaagctaactgtgttgggcacagctctaagcctcatactaatcttactggacatagctctaagcctcatactgatcttactggcatgttgctctaagccagtaactagcatgtcacctggcaactgagcagaagaacagaggtttactaggtcctgagggaggctgttactgcacaagttctttgctggtgacagcagaaagtacttaggggccattccaagggtctgccttgtttgcagagttgattcatttgtggttgccatataaaggcctctgaaccaacaattgtttgggagcaaaagcaaacgagtgccaagatccaagttctcgtactgtggctgtagggttgagggctgcatagggtcgaaaggtataagtcactgtaatatcagcgtggggacaccatgggtctcatcagtggttttgcccatgggcacagcccttgtggcggatgtctaattgtgtgcagcccagatgtcagcggaggcccttggagatcctattaaacttgacccgaaccccaatgccaagccttatgagagccttgaatccacagagcagttgctctccgtacccacaccatatatcatcatgcctcattcagctttcatgccctcttatctaagagtgctgtctggttctgtcctgcaccacccattccaggaacaaagcccatttccttcacttggtcttcacaaaaacccacttgcattcagacgtttgtgagtttggtaactttactgaagatcgagggtcatgaggggagtcttcatagactcggcagcccttgctgtcttttcacctcctgccttctctggtcctcaacctcattcttctgagcaacaggcacctgatccctggtcttctttagtaaagttccccatactcaggtcccttctgtgcccatccaggtattttatcccaagcaaatagatatggccccctgaaggaaatcctggtagagaatcttcctctatctcaccatttgctgtcaataaccatatctttacaggtagatggttagtgaggagtttttggttttgttttaaatgagataagctttacataagaggagttgtttacagggaacttttacagatattattccattcaggactcccagtagccctggcaggtgattagttagacaggtgctattatctgaatgtttgtgtcctccccaaagtcatgtgttgaaacctaagccccagcgggatggtgttaggagatggggccttagtgaggtgatttggtcatgagaaccaggtcctcatgagtggaattattggccttacaaaagaggccccagagagctctctcaccccttcccaccacatgaggacacaaggagcagttggtagtctacaacttggaagatcaccctcaccagaagctgcccatgctggcacctggtcctggacttccagcctccatatctgtgagaaatgaatgtatgttgtcaataagccacccagtctgtgatagtgtattataggaacctgaacagacgaaagcaactggcattattatcctggcttagagttgaggagactgtggcccagagaaggggaagaacctgattggggccactcagctgattattgaagagccggaaccagagcccagatctctactgggttcagtgcatgatccttctccacatcatcttgccaggtcagttctaggagcctcactaagctctaacagtggcaagcattcaataaacgcccacccagtagacattaccaagtcctcactctgtgcctgttttcaagagtgtagagtgaagaaagcatgaataaattaagaggcttcttgttaccccagcacccaacacttagttaaaaccagatgtgatagacaaaatatgttatacccacacaaaggaatattagtcagccacgaaaaggaatgaaagaaatactgatacatgttacaacatgattgaccttgaaaacatgctaggtgagagaagccagacgcaaacagccacagattctatggtttcatttgtacgaaatgtttagaataggcaaatccatagagacagaaagcagactagtgattgccagtcttggaagagggggaaatagagtgagtgcttaatggtgtaaggtttccttttggggtgataaaaaatgtcttgtaaccagatagaggtggtggttgcacaatattgtggatgtactaaatgttactaaattctacacttaaaatgttaattttatattatgtgaatttcacttcaattcaaagtaaaaaaaaactcaacaaaccaacaaaccagtgtgacttcacccccccaccttcagctttcacctccttgcatggttccaggtcctgatgctccctcactggacagggaatgaacatatgcagactcagttctcaattctgtcacttaccagctatgcggccttgagagtttatgcctttctctggacctcagctttctaacctgcaagttgaggatgtcacccagattttaacccaagttccttctaggtaggcattctgagatattgggagtaaaaggaaggatgcaaaccaattggggaggggcaggggaggcactctgtttcttctgcaactttctcttctcagctagtggactatagtaatttttagtttccagtccccagtcacacagatagcagcttcggctcttggcttggctggcactgctggggctcccactatgcttcactgagcaacgtaagcccctaggtaatcctgttaagccactggggtagtgagtcatttcagtaccacctgaacaccttcctgtggtgtcccagcaaggagaggacctccagccagatcattatgacttgatctgcaaaaacttttgaagcataaattggagcttttaattgcattgtgacttggaaatccatcatgcctaaatcagtgttcagaagagctcaaagtatgctcattcattcatttattacccatcttctgtgcccctgttacatcccaggtgctgtgccaagctttaggaagacacaggtatagccactgtcttcaaggaattcactgccctttgagagagacggactcataaaccaaagtaaaatgtagcatttacaaaggtagtgaaataaaagtataaatcaggaaaattagcagttcagtggagaatgaaggaatagattaaagggtcaagagaggtctttacagatgaagtaatatgctgagttttcaagaataataggggacttccatgttctagtggtgctccagggaggatgatggttacagtagtctactccagtagggagaagcatttttttaatcactgttgacgtttacaattgccagtgcaagatgacaataaaaagatgtctaaattttaggctgtcttattgatttttaaattcctagaaataatgcatcttcttattgcctaaactaggatagattactcctcccactgctaccaagtacagaggatgtggaagggcattcaaaacacaaggatcaacatgtgtcaaaagttttgaaggatgaaactttagagtgtgttcatgaagtggcaaggagtttgatatagcgggacataaaatatttggaaaaagtgagctgagtaagagctgaaaatgaagctgggttcattttttgagggcccaagatacggtgttaaatttgagttttattccagaaggcactggggagccacagagggtggtcagcaaaagcatgatataatcaactttcttgttgatgtagcactttggcagctgtgaatggataagatgggtcgagaatgaaggaaggaggctggccaggaggccctttcagccatttgggagggagatgatgagggttatgccaaagctgtgtcagaggatgggaaaagggggctgagctcaagagatatgtaggggttaaactccaagggactaagagtctgatcagagctgggggtgagcaaagaaatgtctaaataataatttctatttctccttgcaaatgtcctgcgaatgtcggagttggaagggatgtttgggaccacctgctcaaccgtctttgtagcccagagaaatacaaggtactgcccaagctcaggagttgaaggcagagtcaggatgggatctgttttccaagttcccagccagggctgtctcttccactgtggctgctctccatgtgctggtgaccttcccttgatcccacccctgctcgtcagcagaacagtgactggatagagaagccttgagttctcgttcttaacactgccccgaaacagtgacttgaaggaagaccctgccttctttgagcttctgtcttcttatttgtaagtgaaaggcttgtcaaagaggaacttttccatttttaattcctcttgcttctgattttctttcttaattttgccatagtccctaccatttcttcttgccttacattaggcccacttcactcatttctgtctggatctgagctctgagctctgacctagatcccttctggaggccctggcactcactactagcctgtcctgcttgtctctgagcagtcaggccatccacagcagaggggattgtctttccgagctgcacattcctgggctgggccaccatcctctctctcagaaaaattacgtctttctctgcaggtgctctgcctggactgtgtattggagagcaaaggaactgaatgctacgcattgcggatttggataccatgtctgctgagctcaggtgtgctctggtcatgctctttcgcaaggaaatggcttcaggacctgggacctaagtcccagtgtgagtcagattcctcagggtgcttgagctttctttgcctgtgctcttggggcacaccagcctatagggtcaggtgccttaggggtagatctcaaaaatagaaagctgttaaggtgagctttctcatcaagctctctctcaccttcctgccccaaccttctcaagtgtcaagagacgagagagactcagaattggggaaggagaaatggggagttctcagaggccctggagccaccctttcagccaatgcagaatatcttcaccaccaaactgccccccccaacccccgaaaaccctggctttcctctcctgtattcctgcgcccttcatttgaacagtttatacacctcctgtatgactgtgcagggcagctgtcttgtcctattttaaacttgtcttccacacaatgatgaaagttgcctttttgtaacttccaatgattgctcctctcagaacgtaccaaatccctgtcttgcaagacagtcttttgagtatataaaaacagatcatgtatctaactcccattcaactacttttctgccaattaaactcaaccaattcatatgtggtatagttgccatattcttaggatgtggtatctcccaaagggcaatgattctaggtatggtttaactaacttctgtagcaagaaaaccacaaatgccagtggcttaacacaaaagcggtttctctcttatgtgacagttcctggtcagtgggtggttttcttccatgtagtgattccaggcctcagggacctgttatcttaaatctctgctatcccctaggcactgccctgtagccctctcaatgatcctgctggcagatggagggacagagagtggaggaggcacaaaaagtgacatttgatcttccactctgattccactggtgagaccagtcctatggtatctccttccagaaacatggattgggaaatacagtccctggctagcctgctcccccattggagacaactctacacagtgagagtgggggacatttgaaggaaagcaggccatctttgccacactaggcacctcttccacctcccacttctgagcagccagcatggacgacctgctagatgctgggtggaccagggtggatgggtgcgttgggggtgtggaggggagggcaggtgtgtatttctcccctcttgtgtctaattggtaagcagtattttcttgaacttcagttctgcaaacattacttttgagatctttgctatatctgcataacacctgtactataattgacttaatattctctttacactgattcactttttaatttagtttcacctgaagggtaatatctgggaaatcatagttttgatatgataattatacttttcccaatatgttctaaaatggatatgtaattattttaatataaatatttgcagatataccacctcaaacaaacaagataccactggtgggtacattgcacattttaagaaatactgtgattgagcctgtataaatccctcataatctggtccttggctttctttctgaccttacatcctgcctcttccctcttgcccatgatcctccaaatacatggacttatttgttcttcaagcctgcaagctcgttcctactccagggcctttgcaccagctggtacctccatgggaaatactttctgtacatcttcccatgtctggttctttctagacattcaagacttagctcagatgtcccctgctcaacgaaccacccagtctttaccagctgcctcacacctcacttcattccaccctgcacaatcactctttgtttcagtccctttaagcacttttcaagatctggcatggtgtgcttatttgttgatttatttattgtctctgtaaccctagtaaaatataaattccttaaaagcagggatcttacctatcttgtttacctccactttcccggcacttagcacagggcctggcacataatacttactccataaatatttgctaagtgaataaaaatgagaaaaatgaacatagacacctagttcactaatcaaatgagaattaaaataaagttttttctttcaaatattttttattgaaatgacaatcaaataaaaaaagaacagtgatcaatttaagcaaatttttactttctaaatataaaaatataaccaaaacttatttcttttatacattttccataaatgtaataccagaaaagttctcaaagccaaactataaatgatgcttgtgtactatgatgtgaaataaattttttttagcagcttggttatccttgatatgcatttggtaaacgtttgtagaaagcaccttggagatgaggtcatacgaggcctcccatttcacccatgaactgcaggcatttgggcctgcagtatgcaggccatctgacttacttgccagccagaaagagaaaagctggacaagatagattggtaagccagacttgcctctggaagacagaccctgggttcacttgtgcaaaggttgcaggaggctgggagaggaggggccaaggatccagtcatccatgcgtggggccacaagcagcctcagtggcccagggagcaaacatgtgtcccgaggctgtcagcctccactgattagattggctcctgctcctccttcgtgagaggtgggataaaccaaaggatgctgaaaaaacccagaagtgtccaatccatatgttggcatgggaaatagaaaggggattaaaagtcactttacttatggaactatgaagaaggtgaacatgcttttccttgcagaatgatcagtccacaaaagacatgtaagatgagggcaacagccaatagaacccactccctctttctgcagaaacacagttgtcatgaatgctgtgatgcggcccccctgaatgccctttggaactgagggactcatttctgctactcagtactgctgggatcacagctgaatctcttcctaggaattgccgtagcctgaagggagctgccttacccaaggtgaaacctccatcctaggcacagatcccatccaatgactagttgatgtagggatgcagagacctgaccccgtggcttcaatcccagacaattctgaaaagccacaccagctcctgaccaaccacagtgcattcaacctctcctgccacccaatcctgcttccctcactcctttgcattcccaataaactccctgctcacgaagcttcatctcagagtctgtttcccagggaaccctagggcaacttgtgttgtccctagttgactgtgtcctccacaatcagttgccatattgtttaagtgagaaccaagttctcaccagttttttactaagtttgtttcttgtacgtgaagatgagacaaaccatatccaaataagtgttggtgcacctgaaagaatggtgggttattcccttaaaattacttgagataataaaagttaaaactacaggaagataacaaaaatagccaagtgaagtaatatatgtaaaacagttgacatttcccaatctgtttcacacaaagctttggaccccatttatgtgccagtccatttctgcgtccccactgcctccacgcctgcggctcacttaggggaatgtctcggaggctgatacctttctggcatctcctactactgccagcttcctcagtcatccccaccccactcaggaaagggctgggctgtggcatggcctctgccacacctgctggatgggagccgtgctatcacagctccagtgctagaaccaaccagatgggaccatgttgctttcctccttccaccagatgatgactcacatcttgcttccccagggctgctcagaggagtagggtgataccacggagatccaggagagttaactctccatgagatgaagtttgccccatgtgagaagggaggcagaagggaggtgactatcacaccctcacctttcttccagctcctccctgctccagcaatattctgtattgcagtggttccctcaaggacaatatctcacaagaatgagtcattggccacattccctggtggtgctgtggccagtgtggtcctcaccttcttgcatttttcccccctcctttctgcctccctcccttcacccttattcttgctgcctggaattatgctgtctcagaaagcagcagcatgtcagctttgcttcaaattttccccagataatccaggtgaaggcatgggcattaacttatttgattggttttcacaaaaagtcatcctctggggggttagaattattgctggtatttttcagttgagtagactaggggtaaaataaactgcctgaggccaaagctgcacaggaggtggtagatcagggctcagtctgcgttctggctccaaatttgctgttttccttacacttgaatttaagtttccatcaagagttatacaaccaaggaactatatctgctcctgtaaaggcagtatttaggggtggggtggggtgggtgtgagggtgtgcaggaatcactagaaaggacatagaaaaatctcccgcaggaggtggatgaattgagatgatagtcccatgggctccacttcctgtctttctatcccaaactttcactttccgcaggttcaacatcaaatgtgcatttttaggctcatgagagtaaagaaaatactgttgccatgcgtatgagtttcctagggtggtttaaaaggaagagactattctctcaaagttctggaggctacaggtcctaaatcaaggtgtcggcaggaccatgctccctctggaggctccagaggaaaatttattctctgcctcttcctgcttgtgggggttgtcagcaatctgacttgccaacagtcttcccttcgctttcctcctatgtgtgctctcattatcttgctttgcctttatctgataagaacacttggaatggcattgaggatcctcacatttaacccacagaaagcacatctcaaaataattaatttaattacatcagcagtgaccctttcattccaaaaaggtaatattgacaaattccagggattagaacttgatatatttgggtggccattattcaacttgctatgcttgataataggctaatttgcctggagacatcagtgtgtccttaaacaggcttagaaacagttctgagtgttcctcaacattacattagttgtcttaccggctggtgcaggggaggagtcctctgggctgtagaggtggctgaagccaagctttctgcttttccagtagtgagctaacaggggcactgagcagaatttaccctgcccaaccctctgagccctaggtagggaggtctgtgatgttgtcttgatggtgcatgattcccctactgctgggaccacagaggatccctgggctgtattgcctttgtttgaattttcagttgctgtcaatcaccctgagccaatatttatatttcacagaactatctcatggcaacttttagaggaaagaatctttctaatcacaaatatttgcagtacgtgaccttgttgcactttggccagtgatgttgaaaaatgggtcatgtgcagcccggaggtcccctacagatatgtctgtttgaacagtttcctggcagtactgtcttcttagggctcttgtggagattactgaggtgctgaataaaaaagagaacaaactgtgcctgagggccagatgccatgcaaagagagtcttagcaaatgccaacttccttcttttatttattcttaggctgcttcctcttcattttcttcaggggctacatttgattatattaattagcgtattttttcctcaagttctctacccaactcccaaccctttagttccagcagttaatattacttttaatttctagaaaattgaggcactggagtaaattcccttaattggggcctccctcacctttactctgtcacctgcaaaggtaccttcgtgctcatccgttctcccttctttcagtcttagaactatttaaagccacgtcttatactggcatggagggttagccattcttatgtcctctaggtcttcattccatcagttagttccttgctctctcttttccagagtggctccattaaaatgtaattaatgtaccataaaagtcacccctttaaagtgtaaaataatatttgtagtacattaatgaacttttgatttaataatcactacccaattctagaatattttcagcatcggagaaagaaactcagcacccactggcaaatctctctccatttccactcccttcccacccccagcccccagctttgggtaaacacttagctactttctgtctctatagtttttcctattctgaacatttcatatcagcgaactcatacaataagccatctttcctaagtggcttctttcacttaacaaaatagtttcaaggtttatccatgttgtatcacacatcagtatatcattacttttgatgtataaataatatttcaccacattttgtttatttatcagttcattaatatttgaattctttccatgttttggctattatgaataatgattcatatacaagtttttgtgtgggcatgttttctcttctctttggcatatatctaggaatggaactgccaggtcatatgttaaccatatatttaacatttttaggagtgatcaaacttttccaaaatgtctacaccattttacattcccaccaacaatgcataggggctctaatttttcatcatccttaccaacatctattattacctttttgatcacacatatgctagtgttgtgaaatggtatcctattgggttattgattttcattttcccaatgactaatgatgttttcttagtcattttgtgccgctgtaatagactaccagagactgggtaatttgtaaagaaaagtttctcacagttctggagcctggaaagtccaagattgaggtgatggcatccagtgagggccttcttgctgtgtcataacgtgaaaaaagtcaccacatgggcaagagaaaacaacagagagggccaaaccatcatttataatgacccgcactcttgaaataatgaaccacttctatgataatggcattaatccattcataagggcattctctcatgatctaattacctcttaaagatcccacccctcaagattattgcattggggattaagttttcaacacatcaactttgggggacacattcaaaccatagcagatattgaacatgtttttatgtgtttattggctatttgtatatctttagaaaaacatctgttcagatgctttttcacttaaatattgtgttttatttttattattgagttgtgttttatatctatattctggattctagtcatttaccagatacatgattttcaaatattttctctcattgtgaggattatgttttgcactttcttggttgtctttccactttcacattttttgcttttactttattgtacttttaaaagcgcagaaatttttaatcttgataaagtctaatttttttttattctgattgttgttgcttatgcttttggtatcctatctgagaaaccattgcccaatccaagagcacaaagatttactcaggttttcctctaagatcttttatagttttgctcttccatttaggtctgtgatccattttgagttagtttctgtatacagtataaattagtggttcaaatttattaattttttttgcatgtggctatctagttgtcacagtgccagttgttgtaaagatttttttcctctcattaaatggtcccaatatctttgtcaaaaatcaattaaacctgaagatgagggcttatttctagattctcaattttattctattgatatataaatctagtttactttagtacatcctgtcttattacagtgcctttgtagtaagttttgaagtcaagacatgtgagtcctctaatttttttaaagattgttttacttattctgggtgatttgcatgccttacgaatttcaggatcaactgccaatttctgcaaaaagctagcggaaattctgaaggggattgcattggatctgtagttcagtttggggagtgaactacagttttaaatattttgtcttttgatccatgaacatagaatgtcttttcatttgtttagatcttctttaatttcttttaatgatgttttataatgttcattgcgcaagtcttgtcttagttttgttaaatttattcttaataattttattacttttgatgtaaataaaattattttcttaatttcatttttaatttttcatcaattatatatagaaatagaattgatttttgtaagattttgtatcctgctgccttgctgaacttggtattagttctaataagtttttgtgggttacttaggattttgtatatacgtcatttgtgaatagatagttttaccttttccttttcaatatgaatatgtttcatttatttttcttacctaattgttctagctaaaatctctagtacagtacaaatagaaatgaagaatgggcatccttgacttgtttatcattttagaaaggaaatgttcagccttgatcattaagtatgatgttagctgaggtatttatagatgccctttatcagattgaggaagtaatcttttattcctggtgcattgagtgtctttatcatgaaatggtgttagattttggcaaagatttttctgtgtatattgaaatggtaatttgtttctttattctattaatacaactttttttttggcagggggcgttgggatggagtttcactcttgttgcctaggctggagtgcagtagcacaatctcggctcactgcaacctccgcctcccaggttcaagcgattctcctgcctcagcctcctgagtagctggattgcaggtgcccaccaccacgcctggctaattttttgtatttttagtagagatgggatttggccatgttgggcaggctggtctcgaactcttgacctcaagtgttctacctgcctcagtctcccaaagtgctgggattacaagtgtgagccaccgcacccggccaatacaactttcatgtgttgacccaaccttgcattcctgggattaatcccatttggtcatgatacataatcctttttatatgttgctagagtctctctcttacatctttaatgtttttctggactgattcctttcctttagctaataagcatgcttaaatttttttcaaaacaatagagaaacaaacttactcttgggcccaagcaacttttttcttttcttccattttattctaactttggaaaggattaccctctttttagataaacactaattcatctcttaaccataatgaaagttgcttgcattgagatttgaaggacattctaactgccaaagtccatgaacacttttcagcccctactttatcgaactttagtagcattctacagtttatcatttccttctcttttgaaatattcaaatacctggagttcttttgtatcttttttatcacggcttcttgttcttctttgggatcacttcttcccctgattatcaaatactgctgccccttaaggttttgtctttgggcacatttcttctcattttataggaaaatctcatagactctcatagtttttactattatctgcatactgatgaatactaaattgttatcttttcttatattcagcaaggtatatccaatcacattctagacatctccccttgaaagtcctacaggcttatcaaattcaagaactcaaaacaaaactttgtagcttccttatactgcccagcctgttcttcagatgcgaacatttgaaatttaggtaaatttaaacagctccctaaatgaggtgagaattgccatagcttactgatacaagtcgccttttcattggtgtgaaatgctgtgttgtagaaagagataatttaacatttcctatcctcagaaagcttttagtcttaagcaagagacagaaatagacacagatgactatattccaaggcaatagcaaaaaaaaaaaaaaaaaaagaattataatagaaactcaaaggtggatgagttcgattcttccagggcaggtggaagatgggaatgtagaggcttcatagagatggtgacttctgaactgggacaggaaggtgagtgggacttagacagatggggcagggtggtggtgaattggctgagctgttatgggggataaagccagtgtgcaaggaggagcatatggtttgatgtgtctggtaggagataggaggaacatagcaggtgtcaaggtaaaggccagaatttgaagcatcttgaatgccaccaagggaaatttgagatgcattctgtagacaggaataactaattgaagctgttaatcatggtagtgacagggtcagagtcacattttaggaacattcaaggagtactattcatttaatgtttgcatgcattatttttaagttattcctaggcacctcagagtagtgaaggggaaaaggtcttgggagagcactgtcattgtttctgttttggaggctgtgattcttatatttgaaaataagaagacaatgaagcagcattggatattaacttgtcaaagttcagccatctttgccagaggcatcttcctcccacacccctacggcattgtcctttgccaaaactgaaatatgtgtcactgtgtcctggaggcagaatgaaaatatatacattaaacaaacaggaagaaacacatgaagaaaaacccaccaacagttattacatggcaggtgtacagactcttccccactcaacagcactccctagcatgacatcctgtaatgttgccagggcgtgggtaaagaggggttttctcagcatacagaacacaaaattcttctttacatactttatgttctgctccagggccccctcttccctgaagactcttctcttccccagtaggaagcaatctctccattccctgctttcacatgactctgatagctataaaattcgtgtggcatttgttcccaggctgctggtgaaatcctgaggacagggcctgtgttgtcctttgctgtattcttcatggtgtccagaagagaatctggtgtccaggctcctttgagcagtaatctgcagaatgtgcccagcctggggaaatataaagaacaatattttgaagagtgtgaagaaaatattcaaagttttatttatacctatttttaactccaaataagaaacaaattaacccttattattctttaatgtatagatttacggaagtgtatacatataaatataaaaatataaataaatgtattgaggtgaatgcacacattttcttcttggtggagtttgatttaaaaaaatgttttgagatcattgctctagtgctgaattaataattgctgcttgaaatatttagtaactctaaagagtttagctttaaataggaaaagttattgccaaagacaaatgtaggtcattcatttattcttgccaacaaacacaaatattaaaaacagtgtcctcttttttttttttttggagacggagtttctctcttgtttcccaggctggagtgcagtggcgccatctcggctcactgcaacctccgcctcccgggttcaagcgattctcctgcctcagccttccgagtagctggaactacaggcatgcgccaccacgcctggctaattttgtatttttagtagagacggggtttctccatgttgatcaggctggtctccaactcccgacctcaggtgatccacccgccccggcctcccaaagtgctgggattacaagtgtgagccaccgtgcccagttaaacagtgtcttctatgtgccaggcattgtgctgggctctgagggttgtttgtttaaagatgacacctctgatattgacatgtgggagggctttgaagaagttttaaccccacataatataatagcagaatgtgagtaaggagcatatagtgaaatgggcactcatattgcctcctggggatagggggctgggattttggcataacttttctggaggacattttgacaaacatactgaagactttttaaaagttcacacctttgacccagtaattttacttccaaacattttctaaagcataattaagaatttatgcagatatttatctacaagagtgattatcatatcatttcgaaaattgaaaaatcagaaacaacccaaatgctcaacatggtattccttatgtaatatgtgttctatgcattcaatggaacgcaacccaaccattaaaacttggtatggagatgcatatttcatcacactgaaagttatttacagcattttaaaactaaaattggttatacattattatataatacaaaatgattctattaatatttatccatatggaaaaagattcaaatgaagtgtgctgagactttttttttagttttggttttaaaattgacatgctgtaaagtacagttttatgggtataagctatgtatagatttatatcaccaccaaaacaattaggacagacagttccgtcacctcaacaaaaccttgtgctgtcctttggaatcataccctccctttacttgtaagccccagcaaccactgatatgttctctgttgcaataattttgccttgtccagagtgtcatataaatgggttcatacagtacgtaacttttaaaacctgacttctttcagtcagtgtaatgcctttgagatatgtgtagtaatagttcttatttttgctgaaaaatattccattatatgactgtaccatcgttgcttattcattcatctgttcaaaagcatttgagctgtttccactttgtaggtattatgaatagaggtgctataaacatttgtgtaaaggtttttgtgtaaacatgttttgccgggtcctagggtaagtgtatatttactttataagaacctaccaaactgttttacagagtattttactttttttccttacccaccaggaatgcataacaatatcaatgctcttcattcttgttagtacttggtactgtcagtttttaaaaatttttattttagcccttccaatagctatatagtgtggctgggcacggtggctcatgcccgtaatcctagcactttgggaggctgaggcaggcagatcacttgaggacaggagttcaagaccagcctggccaacacagtgaaaccccatctctattaaaaatacaaaaaattagccgggcgtcgtggtgcacacctgtaatcccagctactcaggaggctgaggcatgagaaacgcttgaacccaggaggcagaggttgcagtgagccaagatcgcgccactgcactccagcctgggtgacaaagcaagactctgtctcaaataaaatgaaaacaaaaacaatagatacgtagcgatatccaattgtgattttaatttttatttcctaatggctaatgatgttgtgtatttccttatgtgcttatttgccatctgtatatcatctatgttgtagtgtctcttcattctcttgcatattttgaaaaattggattgttttactattgagttttgagagttctttatatattctagatataggtcctttgttagatatgtgatttggagctattttcttccagtctttaccttattttttcattgtcttaatagtatctatctttcctagagaaaagattttttaattttgataaagctcaatcaactcatttttaaaatcttatatattgtatttttaatgtcatatcaaagggatctctgcctagccctaggtcataaagatttctcctatttcttcttctaaacattttatagctttacatgttatacttaaatctgtgatctgttttgagttaatttaattttttataaggtgtgatgtttaggttgaagtggttcacatattagcacatacagatatatatgttccagcataagtttctgaaaataaactaaattgtctttgtgtctgtaagaaattaattggccatacgcatataagcgtatttctggagtctttattctttctcagtgatctatgtgtctatttgtttgctaataccacactttctgattactgtataataggctgtgaaatcaggcagggaggcagggccaatcctccaactttattcttctttttcagactcgttttgattattctagttccttgtatttccatataacctttagaatcagtttctttacacattaaaaaaaatctttctagggattttgattggaattttattaactctatttatcaatttgtaaagaattgacttcttgactgtacccagtcttccaatccaaaaacatggtatgtctttccatttgtacccatactttcacaaagtttatgattgttttctttttgcttatttacttactttgaaagtttatttttaaaatttattatttataaatttccaaggcactttggggaaaaaagaaaaaaaattaaatttttggttatatttaatttaaaatttgaaggcctttcagtaggcaatggaaagggcagatcaggacagtagtggaactggaaattagagatgcccatcatgatgttctgaggacagaccaagatgctagtgaggtgagaaattccagtgaatagatgcggcatgtggagagtatgataagaagtggctttggtcaggatcagggaggaccagagaaaggtaaaggttttggcaaagaatcttccaataatgagacaaagccacatgttaatttgggcagagtctgagtagcataagaagtcagtcctagttacttgaatttaggaagatgatgtccactgtctatgggaatggaaatagttaacaaggtctccaggctgagtagcaagtgctccagatactcaaggaggagtgcacctggcttctatggagagaaacaaagcagtgatccaaatttggactgaacatcatcatgggaggattggccaggtacaatgaattctgaatcttttgagaatctggactaaagcccctgaaattctacttgactaagtcttgaattagtccttggaatggcagttttgagcccgaaggtggaattcagacgggctcagttgtgagaagaggaatgttcgggtagaaagcctgttgaagcgttactcatttgttcactcatttacccaacatttactatatgaaaagcattcttactgttattgctaccatccacagtaatgctacttgtggaatgagcagacagtatgcctacacacgcttgaacacacccacccattcacacatgcgtgtactcatgtacacatgcatgggtggctgcacaggaggaatggcaagctttggccaaatgccagctgggaaacccatggtgatactgagcctcagcctcaggcactgggagccccatggatcagttcacaaggtagccgctaacatcaaagaatggcaagattgtttcaaaactgggacaaagggtagctataaccctgaggcctcatgatgccagagaataggttgatgaatttgcttgcaattaaaaaaaaattctaggtagtgtttgaatacctgggcataaggacaaaatgaattggccaaagccctattaaaaatattaagtagttcttaatttagctagcagcatgagtggggctatggttttttccaacaaaagagatcagcaccttttcttcagcatgtaagagcaaaaagacagcaagtcttttgaacttgaacttgcttattataagctcttatcaaaaatcatcactctgtgtgtattgatttctagccaacaattaaccagttatgaccttagagccttgataataactggggaactcactcaacagagggaagcctgcttgtttatgaacaaagcaggtgtttatggaccccttcagccttgggtgagtatttttccatccaggtggcacaagaagtcacaaatacagagcttcagtggatccttgtccgtgagcttaggctgactatctggagaggtgaggatgtctagacctgactgcaaatgacttaacatcaaaattatgagatcagccacctgctttagatggttgcaactcaatgtctatgttcccacataataggattgctgataataatgtcatttactcatgcatattttacactttacaaaatgttttttacaaccatcataacatgacaatttttcctgtatgattccatttatataagttcaaaactaaacacaagtaaacggtattgttaatgcaaacttaggtggtaaaactatacagcaaatcaaggaaatgatcacagtaacatcaggagagtggtgactccagggcaagaaaggcagtgtgattgggaagcggcacatcggtccttcgaggtgctggctcttttccagttcttcacttgggtggggcttacactggggcttacattgcaataatatgttaaactgtacatttatgacttacgcactttgtgcgtcagtgtatgttttatttcacatatatcaaataaaacaacaaacagcagacataaagacaaaaagaaaaagaaaatcagtttcatcaatgtcattctaaccaagactggttattagttattgtgattcttgtctagagatgacttaaagctatgtgctatataacatatgactgctttggtggtattttaggtaaatgcacattgatctttcatatcccttatgtttttaaagaaaaatcagtatatctatatagttccagtctgggagccctatggaaggactaagagacttgctcaagtcacctggtagttagtattagaatttgaacttgactgtggttgttttgactccacatctaatgctcttgggtggtaatactaatattctcttcctgtcctgaaagactccacacatctttttatttcaaggaaactgaactgagtatcttggctaattgtagaattgtccactggttttcaaacttgctttaaaagatggagtatgtttggcgctgtagtagtcagaagtgccaaaaaaaggtttcgttcacttagcgttgtgaattaagccagtaggaaaatgcgcctgatttcgtcataacaatagcatctttagaaattagaatcttttacatataagattaaatctcatcataatatatttgtagagcaaatatattgtgttcactataaaacattcagagaaattcagaagagataaagaaggaaataaaaaccacccataatcccaaccttcagaggtaggtactgctgaattttgatatgtctttaatctacgcttatatgagagtttgccaaattggtatcctgaaaatgctgtttcaaaacttgcttcttcagcttaatagtgtattatggatattttttcatattaataatttttctataacataatttttaaggactgtacaatataacattgtataaatgcatgtacctgttttttaaaagccaattttcttttattggctatttgttgttttctaattgcttctattataaatactgttgcaataaacatcttcgtaaataaatctttgcacatacccagtattatctccttagaataaattcctacaagtgaaatcagtgggtctgcgtcaaagcgtatgcacacttgaaaggcttttgataatatttgccaaattgtgtttccgaaatattacctcagtttatactcccacaaggagtatataaaagtatttccccagccacggcaataccagatacttgaacttaagttaaaaaaaaatattgttatagtatggttgaaatgtttcactttttttttttttggtttgttttagcccttgtgttgactggatttctttcgtctttcaagtaaaattgtatgttccctctcctgcagtagccctaatgatcaaatatgaatgataggactcagaagtctcacatgtatgcacatattttaaaatttccacttaaaacatgaagggaatccactactaaaaaggaagatagtagattttgcccgtgttaacattgctgttctcaactgaattgcttatttaccctaactaatgctgcataaggcgttctaagcacactcatgtattgttaaattacttaacaatcattcacagaaattggaaatcaaatgagcccagtgtatcaatttgccaaattcagcaaactctggagcaatctgcttataagaccttgtgggggacagcagtcacgaatgggttagagagcccattagcttatgaaaagggctgtcaacacaatcataatctatttacctgtgtttcgctgacagattttttctgagctaatggtgagagaaagctatttccaacattcatactgagacactcagcagcataatggcaggttcaatcccaataaagcaaaataaaacaaatattactatgatgcaactctttctaaaacagaaataatgttaggccccaggtggaattccatttctttaaaatatatattttttatattataaaatcctaacacaacaaaataattgggacaatgttttggcctgcattctattgggatttgactgattagtgatagcttgattaacaaggcttctggaaagaaatctccattgattaaaacatcagcctaggggaaagaagtttgggagaagtatggactagtttcttgttattcccgagctctagagggtagaactgagaaggcgagtgtgtgaaagtgacagagggtctggctttaggtggtctgaagaaatacatttctaacaatcagggctggtctgagaatgtctgctttgtgaggtaggaagcatcctttttccttaagggaggactagttaggaatacagttcctttatcatggggactggagtctgtgatttcaggcaggaatcacatgaacatggtttggtgggttgctccaccaaaatggctgtgagctcagcaaacaagaaacatgagaaatgcccagttaataattttcaagtggcttttttttttttttttggagatggagtctttctctgttgcccaggctggagtgtagtgacacaatcatggctcactgcaacctccacctcccgggttcaagtgattctcctgcctcagcctcccaagtagctaggactacaggcatgagccaccacgcccggctaatatttttatttttagtagagatggggtttcaccataccggccagggtggtctcaaactcctgacctcaagtgatctgcccaccttggcctcccaaagtgctgggattacaggcatgagccactgtgcccagccaaatggcttgtttttgaatagtatactggtcaaagacagatcacaaggggccatcatcagttgggttaggcttagtgttagggtagatcattctcacctaatctcagagacacctagttctatctatcagaaccttcactgacagacaggtggttctccagggcaggtccctttcaatcagtgacttaagggtccagtctaggttaattttgcatctccactatctagacatatgacttctctgtgacaggggaaaaggcaggatggaggactcacatccctcttctttgcttccacttaggtcagttctacttagagtctattggccagaatcagttatgtggcccattctagcagcaaaggagagcggggagtacagccatcctgtgtacccaggaaaaaaagaggtaaaataggtcttatgaagtgttatttttgccaaggtgctcaggggttttctttatgtttacattttaccctggtgaaaaacatgtgtactttactgtattgtagcagaaattgtacatgacttatgcttaccatatagcatcacagacaactgattttatgtagtttgggcagtattttacttattccacatttgtaaaaaatgttttgttttgtttttgtttgtttgtttttgagacagagtctcactctgtcacccaggctggagtgcagtgggacgatctcagctcactgcaacctctgcctcccgggttcaagtgattctcctgcctcagcctcccgagtagctggaattacaggcatgtgccaccatgctcagctaattttttgtatttttagtagagacagggtttcgccttgtcggccaggctggtctggaattcttgacttcaggttatctgcctgcctctgcctcccacaaggctgggattacaggcatgagccaccgcggccggccaaaagtgtgttttgtgtgggaagttggggctatgtactctacctgtgtattcatgccttctctcctgccgctgtgtttatctggggaggagcaatcaaagatggcttctgagcctccagtctagttaaaacatttttctgactttaagttctggattcctcagtgctgcaccctctgaacactagctgttgagaaagagaggtgttattagtttgctggggccattgtaaacaaaggaaatgtatcatctcacagttctggaggccagaagtctgaaaccaaggcgtcagcagggttgcttccttctaagggctgggaaggagaacctgctccaggcttttcttccagctcatggtggtttgctgataacgctttggtgtttcttggcttgaagaagcattgctctgatctccgccttcatcttcacatggcattctccctgtgtgggtgtttctctcagtgtcgacatttctcctttttacaaggacaccagctgtattagaagagagttcaccctaaccatctcattttaacttgattacctctataaagatccagtctccaagaaaggttacattctgaggtcctgggggttagaacttcagcatctttttcttgggggcggaaaaggtagtgatgacacaattcagcccataacaaggagaaaactattcttctaagcacagacttctgaccagcagcccaggctgggcatgactcccacatgctcccacacccctttgccggccagtggtgttttgctctggctctgctcagagccatggctagtccaggacatgggggtggtgctggtgaagcagactgtccatagactttaagaggcaaggaaggctggacactgttctgacaccaaaggccagggaatgaatgactagctgtttgaccatagcgagctagtgagttacagtggggaagagaatcctaatcaccactgtctgccacagtgaagttccttgacaaatgtgtacgaggatcccttttctctggtgacagacatagagtcaggtactgtggcaggtatggtagggcagcagggaaaattatcggacaaggaggtaagagacctgagtttatacctcctgtatttcctttttgagcttccatgctttaatctatagaaagaccatggaatactatgcagccataaaaaatggtgagttcatgtcctttgtagggacatggatgaaattggaaatcatgattctcagtatatctcaaggacaaaaaaccaaacaccgcatgttctcactcacagatgggtattgaacaatgagaacacgtggacacaggaaggggaacatcacactctggggactgatgtggggtggggggagcggggagggatagcattaggagatatacctaatgctaaacgatgagttaatgggtgcagctcaccaacatggcacatgtatacatatgtaactaacctgcacattgtgcacatgtaccctaaaacttaaagtataataataataataataataaaaaagaaaggctggggttggtaaactctgaagttcttgcctgctttcagcctctgttagatagttggtgacactgaaaaatactaaggcatcataatacaagaactcatgactgaaagggtctatatgcctttctgggcccctaatctcctaatctagcatgacttcggtacagggaaaagaggatcacagactgtggcttatgtgctgaaggtctcactctggcagacatgcttgaattcagtcactatctatatctgtatctatattgatgtatctatctcaatctctatctctctccctcacacacacagttttgtttttggctgggggaggaagatatttttaatagcaggttttttattctctctttttttcctggaaaaagatgaaatcatccgtttattctggaccaattataagcactagaaagcgcaggaggaacagacagcttcatcacaaataaatacacactgtgggagggggaaaggaggaaactgttattgattggccttgtaaaatctgctgctgaatcgatagcaatttctggaaatgccagacatttattttgtgtggcttgaacagcggagataataataaacatacttatgaagtgagtctcctgacactatttcctagagccccttataataacatacatacataatgggtactataactgtacaagccatagtgaatatacttcagatttaaaaccccaagccgagttgccctctgctaacctctcttctgtgctggatatagcatctgaatgtcttctctgttaaagaaacacagacaattcatctgcatgaagagataagagatgtgtcctccttagttgtggaaagacaggccgaggattgctctaatggtcagggaagagaatcagatgctgaaactgcctgaccctgcctggccactctgaatttgtggacctgccccttcacctgcgcctctctcagagctccattcatcatttctttctaacaaggggcagcttaccttatgtggatgctgtctcatccccacccacctttcatcctcagccagtctcctttcctcctggcataatgtattctttctgtaggcacatttggcaatcttgccagggccattggcctgagaaaagactcaggggtattttggcaaaagggaaattgttcaatgtggttgagcatagtacaagtagctaccatttattgagcacctattacatgctatataatttattcaccacgttgcttattcctcatgacagccctttgagttattattttaaatcaagtttttaatgaaacggagactcctcaaggtaaaatatgttacctaagatcattaaactattacgagactgagctggagttgagctcaggtctgacttagagactgtatttttcccatccttcttttacctgcttaggtgtaactgggatagtgagaggtaaagctatataccatgagtgcctggtgaaggtatctggacatgattactgtgccataaggaagagataaggtttctttgaaaatgtagatggtgcagagtccagttttagggagatgattttggtgtttgtgtttagcatggagtgatgcagagaaacatgcagactgggagaccatgtagaaagatactgcagcaaacatgatggggagaaaagaagctcagacaaggagaggaggcggaatcatcaaggagtggctcttgacaattacaagaatggaaaactttccctcttctctcctcttgttctcatccctagctcttcctcccttcctagccactttaccttctcctattttgtgatagtgggagagctccttggaaaatattcattcccaggatagatctctcaatgcaaagccaatctcaagtatattgttggatatagatatgttctgagctaagaatagatgaagaagatcacttttccaccctgattttaaaatatatgcccttttagtttggcactgctaagaagaatttgaactactaatttggatgataggaggtgttatttctataaatcagcagatttctggatctctgtctacgtcccatcttttcataatcaacctgtagtcttacaagacagtctttatggttttgaaagccacaaaaagtctttccctagagatctggcttggtacagagagtagtgctttccctccaattacacaagaaaccagctctctttagatgctaagtcaatccttgcctcaagagccagtcctagaaaacagctccctaaatacttaaagatgcaaagtcaattagactttttggatggactatcatgtagggaaccatgtgagttactgagtttttaattcttcagatgttctttgtgcatgtattttgtgtcatgccttgtgccaaggcctttggagaaggccaagaggaatcatacagggcttcatccctcaaggatcttataatctagtagtggagataagtttatattcacatgtaacttctacacaggcaataggcagtccacaccacagaagtgccacagataacgtaggtcataattctaagggaaatagaaaagataggttgtagtttctaaatgacccttaaatgggaaagaaaaaatttgcacttttggggggtgtcctaagtatacagaataactagcaagttgaggcagcaagaaaccatgaagagttttcagggaatcccgacagaagtccaattcactgagattctaggtcctgtggaagggaagagcaagagattaaagaggtaggtaaaagttacataacgaagactttaaacagcagtcagatatgttacatattattccagaggcaataatgaagattcatgacagttttgcaaaaaggaaaatggcatggtctctcagtattttaaagagggtatgacactttatctgcaaggatgagacactggggtaagaaatccagttttaacaccatttcaaaagttcagtggagactttcacttctggaaagattgagtagacacacttttctctcttcctcctgctgagtgcaactaaaatccttggctgttctacacaaaacaaatgtaagaatattctgataggtagaaaagagaaggcaggctaactaggggttcaaaagccaaggaacaacataacggtgagttcccccagctttcttgtgtctcttatattccagacttggagctgaagccagtaactagaagcacctatgagtacggacagaaaagcctcagcaaaagcctgctgtctttagccaaaggatcaggaaagggaaagcatggcaagaccgaaatcttttagatgatagccattctatctcaaccaaagtgataaaggggtcactcaatcaagaagatatagcaatcctaaatgtgtatgcaccatagagtaatgttgtaaaatatgtgaaataagaactgataaaactgaaagaagaaatagacaaatctataactatagttggacattttaataaccactctcactcatggcatgatctctcactcatgccagcaaaagccaaatggaaaacctagacttctgccctcactgggctgtcctcaaactcttccctgcactggggtgatattagaaaaagccgagtaaggggctagaatgttcctccctgcggactggtaatcaaacaccctccctcaccatcattgtgtaagtggagaccacatggatagcccagactcccagttcgacccagcagtaacgaggcacctgtcccctccccacagagatggtgggaaagttagcctggtggagagtcagagatttaccaccttctttttggtgtcaatggagacaatatgggaaacagcaatgaggcattcctgctcctactagccaggaggtatcagtgcaggcctattgagagctagaatttctcctcttgcccagcggtaatgacaagccaccaccctcatatgtaaactgaggctgagtgtagaacttggatttttacttccacctggaagtaatgaagtgacacccctttgtctgaaaaaatagtgtcaaaaaaaaaaaaaaaaaaaaagccagctgaaaacttctcagatttggcaaaagacagattcacaaaattggctaagcctcaaaggaaatagactcacaataaattcataccaagacataccatagtcaaacttctgaaaactaaagacaaagaaaatcatttgaaagcagcaagagaaaaatgataccttccctataggagaaaagcaatttaaaagatgtagatttctcatcagacaccacataggctagaaggaagtagcactaatatttttcaagttttgaaagaaaacaactgtcaatccagaatcctatatccagcaaaaatatcctttaggagtgaaggggaaatcaagacattctaaaatgaagaaaaactaagaggatttgtcaccagcagaatgtccctaaaaggataatgaatggatgtactttgaacagaaagaaagggtaaaagaagaaaccttactatataaggaaggaagaaagaatatagtaaggaaaagtatgggcaaatgcgaaagaccttttttcttcttttgagttttccaaattatgcttgattgttgaagcaaaatatagcaaaccatatcaacattacactttgttttaacattacgcaaagcataacgttgtctgacatggtctcaaatgtatgtacagaaaatatttaagacatttggattaaaatagggaaggataaagggaagtaaagatgagtaaggtttctatacttcgctcaaacagaaaaaattatgacattagtagattatgatatgtatatgtaatatactacctaaaacaaccattcaaaaagctttacaaaatgaaacactcaaaaacattataaataaattaaaatggaattaaaaaatgttcaagcagcctatagaaaggtaggaaaaaaggagagcaacaaaaaacagaacaagtagaaaacataaagaaaatggcagacaaattctagcaaatcaataattatattaaatgttaatggtctaaatataccaattaaaagatggaaattgatagagtggattaaaagacatgacctgatatttgttgtctgtaagaaattcacctcaaatataaaagtaaaagtaatttgaaagtaaaagaatattaaaagatatatctggaaaatatggatcaaaagaaagcaaaagtggctgtctatattaatatcagataaggtggactccagagcagagaaaattaccagagacaatgaggaacattatataatgataaaggggtcactcaatcaagaagatatagcaatcctaaatgtgtatgcaccatacaataatgttgtaaaatatgtgaaataagaactgataaaactgaaagaagaaatagacaaatctataactatagttggacattttaataaccaactttcaataattaatggaacaactagacagaaaatcatcaaggatatagaattcaacaccactatcaaccaacaggatctaatccacgtttacataacactgcactaaaacacagctgtatacacattgttttcaggcaccacagaatatataccaatgtagagcatgttctggaccataagataaacaagtaattaaaatcatgtggaatgtgttctctgaccacaataaaatcaaattagaaattaataacagaaagataataggaaaatctcaaaacactgggaaactaaccaacagtttacataatctatgggtcaaagaaaaagtctcaaggaaaattacactgcactgagtgaaaaaaaacaaaacaaaacacagaacaaagtgagatacattgaactaaatgaaaataagaatacactgcaaatatgtgggatacaactaaagaagtcctgggggagagagagagagagagattgatttatagtactaaatgcttatattagtaaaaagtctcaggtcaatcatgcaagttcctgcctcaacaaaaaaaaaaaaaaagaaaagtaaagcaaaataaactcaaagtaagcagaaggaaagaaataataaagataacagaaaccaatgacatagaaaactacaacacaatagaaaaatcaatgaaacaaagagcttgttctttggaaagatcaataaaattgataaacctctatcaaagtgcaagagagtgagatagaaatggagagatggagagaaagagaaggaaaacaacttattaatagcaggaaaaaaaacagaggatatcatcacagactgaatcactaaaagaataataagggaatactatgaacaactctccacacaaaaatttgacaaataaaatggatcaattccttaaaaccataaactaccacaacttatctagtatgaaatagatcatttgaataaccctataattattaaggaaattgaattcagaattttaaaaactcccaaaaaggaaatttctagttacaaatgatttcactaaagagttcttccaaactaaagaagagttaacaccagttctacatatgtcctagaaaatagaaaaggaaggaataatccttaattcactttataaaggtagcattgctttgattttaaaaccagacaaagacagtacaaataaagaaaacgacagactaacatctcccaaaaatatagaagcaaaaaaaatttcaaaaatagaaagggacaaaatagaaaaaaatctcaaataaaatcagcaattataaaaggaattatgcaccataaccaagtggggtttattttatgaattcaaggctactaaaggtttattttgaggatgaaaggctgctagaatagctaagtagaaagaaaaatataatatatgattatattagtcaatgcagaaaaagcgtttgacaaaattcaacagtaatttgtgatttaaaaaaactctcagaaaccaaagaatatgtctacaaatccctttagcttatattatacataatgataaaagactgaatcctttccccctaagatcaggaatgaggcgagaattttcactttcaccacttttattcaacatagttttggttctagttctagccagtgcaattaggtaagaaaaggcaacaaaaagaataaagattagaaaaacaaaataaaattgccttgatttgtagatgatagacttttatagcaaattacaaggagtctacgaaaaaaaggctccaagaagaagtgaatttagcaaggttacagaatgcagataaacataaacaaatgaattacattactatatactatcgatgaacacatggacattgaaattaaaaatacaataccacttatcattgctcaaaaactgaaacactatgtataaacttaacaaaatacttacaagacttgtatgctgaaggctataaaatgctgagaaaaaaatcaaagacggtctaaataaatggagagacaccatttttgttcattgatttgaaaattcaacataattgtattagtttcctattgctgctctaacaaatgaccacaaacttagtgccttaaaaaatacttattttcttacagttttggatttttgaagtttgatactggatcttacagggctaaaatcaaagtgttggcaaggcatgttctttatgaaggctctgaggggagatcaaagtcccatatctgcaaagtctcctttcccatagaaagtaacatattcacatgttccagggattagaatgcagagctctttcaacagtcatattctgcctaccaccatagtaaaaatgaataatcaattcttcccaaattgatatgcagatatgtcacagtttctctccaaatcacagcaagattttcagtacgtgtcaatgagattatgctaaaagttatatggaaagacaaaggaatttaaatagctaaaacaactttgaaaaacaagaattaagtaggaggaatatgtccactggattttaagacttatagctacaataatctatactgtatagtgtttgtagagagatagacacatggatcaatggaatagaatagaaatcacatacataggctcacacgtatctctcatcaattttttaaaaggtacagaaacaattcaataaagatagcctttcaacatatggtgctgcagtaatttgacgtctgttggcaagcaacaaacaaacaaacaaacacaaaaacttcaacctaagtttcacccttatgtagaaattaactaaacacagatcatggaattaaatataaagcatgaaacaaaaaaccagaaaaagagaaaaacctatagggagaaaatctccaagatcaatggctgagcaaagagctcttaaacttgacaccaaaacacaatccataaaagtaaaaagtgataaatagtacactatcacaattaaaaatttttgccttgtgaaaaggccctgttaacagaatgaaaagacaagttacagactgggaagaaaatacttgcaaatcacatatatgatgagggattaatatctggaatatgcatagagagaactctatcacttaaaattcctagagggaatgtaaaatggtacaatctctttggaaaataggttgaaaataccttttttaaaaaggatacatgcaactaccatacatcccaacaattgcacttttgattatttatctcaaagaaataaagatttgtgctcatgcaaaatcctgtatgtgaaagcatacaacagctccattcatactagccccaaactggaaacaacccagaagatgttcttccatgggtgaataaacagtggtacattggccaggcatggtggctcatgcctgtaatcccagcactttgggaggccaaggtgggcagatgacctgaggtcaggagttcaagaccagcctggccaacgtggtgaaaccccatctctactaaaaatacaaaaattagccgggtgtggtggcacacgcttgtagtcccagctactagggaggctgaggcaggagagttgcttgaacctgagaggtggaggtcgcagtgagccgagatcatgccactgcactccagcctgggtgagagagggagactctgtctcaaaaacaaagcaaaacaaacaaacaaacaaaaaaacagtggtattgtgggaagtcagggaccccaaacggagggactggctggagccatggcagaagaacataaattgtgaagacttcatggacatttactagttcccaaataatactttcgtaatttcttatgcctgtcttactttaatctcttaaccctgttatcttcgtaagctgaggatgtacatcacctcaggatcgctatgatgattgtgttaactgtacaaattgattgtaaaacatgtgtgtttgaacactgtgaaatcagtgcaccttgaaaaagaacagaataacggcgatttttagggaacaagggaagacaaccataaggtctgactatctgcagggtcgggcaaaaaaagccatatttttcttcttgcagagagcctataaatggatgtgcaagtagggaagatatcgctaaattcttttcctagcaaggaatattgatattaatactctgtgaaaagaattgtgttcctgatggggtggagatctataaacggccgctctgggaatgtctgtcctacgcagctgagataaggactgagatatgccctggtctcctgcagtaccctcaggcttactagggtggggaaaaccccatcccagtaaatttgaagtcagaccggttctctgttctcgaaccctgttttctgttgttaagatgtttatcaagacaatacgtgcaccgctgaccatagacccttatcagtaattctgcttttgccctttgccttgtgatctttgcttttgtcctttgccttgtgatctttgctctcctttttgccctttgaagcatgtgatctttgtgagctactccctgtttgtacaccccctcccgttttgaaatccttaataaaacttgctggttttgtggctcaggtgggcatcaaggtcctaccgatatgtgatgtcaccccccgtggcccagctgtaaaattcctctctttgtactctttctctttatttctcagactggctgacacttacggaaaatagaaagaacctacgttgaaatgtcaggagtgggttcccccaatacagtggcacatttattcatcgaatactactcaacaatgagaaggtaccaactattgatacacacacaccctggatgaatcttctgataggaattatccggttttgacacagccaatttcaaagggttacatatggtatgattccacttatattacattcttgaattgacaacattatacaaacagaacagaatagtggttgccacagttaaggaaagggttggggcagaagagaagtaggtgggcctgtaaaaagacaatgtaaaggatccttaggggatggaaagattcagtatcttgactatatgaacatcaacatattgattataatattacactatagatttgcaagatgttaacatagggagaaactgagtaaatgtacaaaggatttctctgtattatttcttacaagtacatatgaatctacaattacctcaaaataaaaagtttaattaataaaagttcagaggagatcaaactaggatggtgattccaggagtggtggagcttcagaggagggtggtgttggagaaaaacacaaatgagagaaataatttgaagagctactttagtggtccttactcccccaccataatcatggtatcttgggttgactgagattgtgtgtatgcctctggataagggcaattcttgtttgctcagttacttggtacaaaggatggcgagggacttctccaccttgcgtcccttgttgccttggagcactgtcctgttctgatctattagtaacttttggaggcaaatcaaagagccattgatagaaggctttgaggggctaaactgccctctcactggtcctagtatcaaagtttggagacgttacataaagaaattttctaaaattctccaagatagtgaggaggtggtggtggaagggtagtggggatgtactgaatgaatatgagcttgcccattgagcccatagaataaaaagaagaagaaaaagtaggggaacactggcttccagagggaaggcaagatcatgcttttccctccttcacacccatgtccttgccacagccacactccccttcaaagatgagtcagggctgtcaaaggcaagagtattatggactcctgatttggggggtgagttttcacagggctgagctaacagcttgaatgttcacccttctccctccttctcctggggcttctctccctgttgcttggaagcggactgtgcttggaaggtggctgtccctgggaaggcctgggggctggggcatcaggagggttttgttctgtttcctcctgtagcccaggcaagagaagacttgatgagttcttgtggcccagctagacaggagcctgactgaggtctagggtgtgggcccaagcttgtggtgatgaggtgctcctctgcctgctcctgccctgcatggctcctggagaagcacccatggcagctggcttgagggcttgtatcctggatctggaatttccaaaactgagagagaaagcatgagaacaagaaagagcaagcaagggaagtgtggtggagagagagagacagactatgtgccttggcttatgcctgtaatcccagccctttgggaggctgaggcgggtgaatcacttgagctcaggagtttgaaaccagcttgagcaatatagtgaaaccctgtctctactaaaaattaaaaaaaaaaaaaaaagaattaagccaggtgtggtggcatgtgcctgtaggccctgctacttgggaggctggggtggcaggatcgcttgagtccaaaaggttgaggctacagtgagctgagatcatgtgtctgcactccagcccaagtggcagaccgagactctgtctcaaaaaataaaagaaaaaaataaagatacagagagacaaagagcaaatgaacagaatataaccacttcatttctttcttcctttctttccatataccccttacgtttttatcctgtcttcctcaccatcttaacctccccttacatgatttggttgtttgcattttggccttgtcttgtttttattttagctttgtcttttagtgcttgtattggtttttagtaaatgacagaaaattctctaagtcaaccccgggtctttacagtgggctacgtgctctaatccccagtctccactccctgcatctttagcctctccctgtctctccctccagtccagccacacttgactgcttactgttccttggacatgctaggaggaaccacctcagggccttgcatttgctgtttcatttgctgactgcctgccccacgcaccaccctgcaaattgccacatggctggctagttcccgttccaggtcttgccttaaatgtcatgttttcagtgaggtagtccctgagcatcctatgtgaaattgcatcaccccttcaacgctccttaccctcttcttggtctgctttattctccaaagcacgtgtaactctctgacatactctgaattttactcttttatcttactcattgtctgagttcttcaattagagtgtgaccgctacaggggcggggctttttgtctgttttgttcactaccaaatgtgtctataacagaccctggcgtatagtaagcagtcgggaaatacctgataaataaatgaatggaataagggaatggataaaattcttactggtgctagacaagatatagtttacatacgatacatctctaatagtgtaaattaagtatattaaatattctgtcaattaatgtaatattattaaatatatttaatagtaatatttaaacatttcttaaaagtatatgactttgaaaagaatactggactgaaatttaaagagttggggtcagttccggaatcttcaaaacagattcaacagggaagaagcatttaatttccctgcctcggtatctacacttgtgaaatgagtatgatactctctgtgtacctcacgggattatcatgagaatcaaataacatattgaatgtggaagtgtaaaaatgcaaaggtaaatcacacgtatcctcaaatctctgccatgatagaacggtggtattaatggttagttatcatgtaatgaaggaattcagaaagtgctcttacttatcctcgtggtgatagcgacacacagtatgacaagagcgccgactactctgtgggacttaattgtcatgaggtaccgtgcggttctctgagaaacttatcctatgaaacctgagtgtcattcgggagcttatcagcagtgcttcttgaggggaaaggagagcagagcagcagagcctggcgatgtcatggaatattccttcctttcttccattccccgagctctgtgctgttgcatttctggctgcgtattattgacagaggaaatgctgattcatgggtctgagttataggaaaccttgtttcctggtggagaaacaagcccggtggtgctgccagcatcctcctctgccagtttctgccacatggccctgcttctgggcctgcacccaggcgggctgtgaagcagtaaggccaactcaagcgcgaccaatgaggtcactttccctggtgaactgaactaagctgagactcctctagggcctctggaggctcttcagctctgatctcacgatacctttccagcccatctccagctgctccctctggctccccatgctgctgtcatacatggctactcccagttctttgtgaacaccttgtattttccagtctctatgccctggctcatggtgttccctgcctggaatggcccctgaccaagtgtcggctcattgaaatcctacccatgcttcaactctgctaaattgcttctcgctatgtgaagcctgctagatttccttgtattttttcctttcttcctttcttgctttttttttttgtaggggattttcaaatatacacataaatagacagaattatctgatgaacttccatgtaccctcgcccagcttcaacaattctgattcttcttgaacagcacttgttctttccttctttgagcttcctcagcagctctcatgttctgtgcataacccataattgctgaattgagtgggaagaaggtgactctgtggatttagggcgctccttttagccaccccccacaataaggaaactgaggcccagagaagtgaagtgagttgcccgatgttataagacaggtggtggcaaattgagatcagattcttttgaagggcctcacaatctaattagaaagcatggataacatacttataacatgtatatgttagcagatctcaagtactacaggggctcaagttattagtaagtgtgtgttgaatgaataaattaaacttccattcaattgattaatgagatgacctcttaagcttggcactgagtagtccactggtcctctccattctatcatctgacatcaacatgctgaaggagattcctgacttctgtggagaaaaatcctatacaattataatggccagtatgagttagtgagaagtttaaactggtaaatattcaaaaataaattttgttttcttactacatggagtagagagtaggcattttgtatctgaagaacctaaatactcagagttaattcttactggaaaggtaagaatataaattaagggagtctgaagttctgtggcttgaagcacttgtacatttgatgacttgggaaaaagacataaaaagtatggcaagataaagcaagacataaaaagccagtcctgggataatggcaatttttcatcttgatccagacctatctcaaacctggatcttagaagtacggcaaggggtcatttggatgtccagcctgaggtgccctgactttactctgtagccatgggaacacagatccggtcatcaggcaagcaccaaagctgttgccagtgggacagggtggtggatagaaaatgtgtgtgacttttcttcataaaagtgagttaagacacaatttgagattctttttttttttttttttttttttttgagacagagtctcgctctgtcgcccaggctggagtgcagtggcgcaatctcagctcattgcaagctccgcctcttgggttcacgccattcttctgcctcagcctccccagtagctgggactacaggtgcccgccaccatgcccggctaattttttgtatttttagtagagaaggggtttcaccgtgttagccaggctgttctcaatctcctgacctcgtgatcggcccaaaaaagatggcctgaatcagagtctttctgcaggttatgcagaagcagcgcgtaatcactgtatgccttggcaggtgtcgcacccaggcatccaccaggcattctgacagctctgtcccatgagctcatctgaaggatggtggtggtcacctcaatgcctaggtcacagggtggttctgaggttcaccaaagtaaaggatgagagaatgatttgtaacctgcgaagtgcctcgttaaggtcctgacagcttcatatctgctgttcttattagggatagctagtggtacctgccaacatcagagacattgccctgaaggcgagagaggatacaaagaggagttcttagaactaggggttgcatttcccattttagtgtgggccagagacccgggtaaggagagcactggggacattcctggaacttttgtcccttccctacactcatcactttctgttggtatccctgtgcagatgatcataaaatgtatcaaaataaaacttgccctaggtgccagttttaggggcagcaagttgaagggtgggtacttgcgaggacatggggtggtgagaagtgttttgcattctgtaggcagcctgcaattatgaagagagaaaaatgggtagaattttaaactttgtgggggaaaaagaggattttaggagtacagggcagaaggatggaatgtgcccctgaattgggctggtggggagtcctttcatgtacaggaaggaataaaatactgctaaaaggagatttatgacattcactacagtcagataggatagtagatgacagtttgctctctaaaatccgtaaggacacatttcctcctagggaaaagtatccttcctcccaccgcacctggcacaggcatacacatctatttatttccttaataaagtatttcttcaaggagattagataggtaagtgcgtcctagcactaagtaaccattactcatcccaaatgtggtcttcagtacaataaaccttaattaaacaccataaagggacaggatacttgttcaggcctctaggggacacaaattggaacagaacttgagccctcaacatgtctatagcttagcaaactcatgtggctcagagccttcacaacaaagcaggaaaggcaaggcctcccttttcacctacaaaggattcatcttcttctataccctctttgttacaggacagtaatgcttccaagctagaggcattcaaggagtggcccagagaacatgtcattcagggcctggaagatttccatcagcattcaggtaaaggccttggcccctggagcctgtctcaccaggagggagcccggcaggaaaaaaacagttgggttgtactgagctgatctcattagtgctagggttaatcctgaggttaatgtatattcgttagattttttttgtttgtttcctggtgaaatatttccatccctaagctgagttactctgtaaacttcggcatggatttagctgcattctcactgaaatgcagtgccagtcagtgtacaaaaaaaagccctaagatcttcctttaaaagggctatatttgagtgttcaggtcagataataaggcccagagaaggtacagaagaaatgaagagtctgcacttatgtgcctgtaaatgtttaacaaatggctctgtggggtgaaggggaagccctgtttgtagtatttgctgatttctgctgtgtaaatactcccactgtgcctgatttcaagctaccaatacgatgctcactgaatgtggagctaggaagagatgccagggtcagctcttgtgagctggtacctgttggctcccgtacaccgctagccagcagtcagaacagacacaacgagaacacacttggaggagaggaggagttggaactcagatgaggaggttaggtaggtgtgatggtgaatgtgggagtgtcagcagcacacgaagataagcaagaggtggacaggctgagcggcagccagcatcaagccagccataataaatggtcatcctaagaaagacagctactattcactgagcaatgctatgtgtcaagaattcagtctgctttgtgatgtattctcacagtatctctgcaagggtaattttattcctatttaacaaatgaggaaattgaggcctagagagataaagcaactagtcatgtaagaagtggttaggtaagagtgcaaacctgctgtttgtttccactctaccatcaagctagggggaggctgggaataagtcctgttcctagacaggcaggctatggagctgttggtggtagactttaattccaacagttttgtaggaatgaggaccctgggtggattatgaaatcagagataagatgagtcactggacccagggtgcaaggtcagaaagggacaaacttgatgctgggtcacctgactgctaaatgtcctctcactgaagacaataaaagccctcaatcctggagtggagcagagaattaagttgagaactcttgcagtgtcaaccacgcaaggtatcagtgaccaagtccttgtggatgcagttgggacttctgaggaaataccctatataggataactatggatatctatgttttatatcaataggggtctacagtcctacagagctgtaatacagcctacggaaacgagtttgaaaatggaaaactatgctgaataaactgcttatgacccaacatcattccaaagcagagttgagactatggtatagccgtgcacagtgtaaggcatgaaggttggacgaggatccaggtgagttaggtaatggaagagggatgtgacaaagcgtgcagaaccgaaagcctcaggatgagatgaagaaggagtgaaggaagcctgggaattatattaaagaaaactagaggaaaaccacctttcaggtagagggtcaagaaggcccaggactaagaagagcctgaaaggtctccagggaatgtgacactggtgcaaaagggaaatggagtaataataagtggctgataaatcagattaaactttgctggtatttgctatctgtagatagcttatgttcctgaagttcctttcctgagtagcagagtttaatggtgtctcttaactgtcagtattctgtgtgagcattgagagttgaaagatagaattacagtgacacaaggtggggaatttattattcaaagaaaaaccagattgaagtgggatgttgtggttgtagatgccctgtctatgaaggacaaatctcccttttcattctggagtgcagtagccaaaatctgtgccattacatgagtgagccctttactacaacaaccttatgagataaggtctcctattcttcccattttaaattacagagaaggaaagtttaccctgctaagaaatggcagaattaggatttgaacctcatataccctttagaacctgaacctatattattagggcaaaccatataaaattttctgggttttttagtattttatattggatgtcggtaattcccaatcacattattttgaccctcagtgtactgagaataccatagaagtaaacagattttgctgtttcaagaagcagaatagtcagtttcagctgcaacacagtgtcttgtcttttgtcacttgtgatgctagtggtgggaatagaactttttaaggagcagagaggataaacttgtgagattttcaagcatgtggaagtgacttgaatggattccctttaggcaatggacacctggatagagatccaggaagagaccacccagacggtgagctacttgaagagccagcatggtttctggcagacagtgttggttaataaacagtgaacactgaacgtgtatgcctgtgtcagatttcacactgagatgacatagtaatatggctctcccctggtgtgtacattcactactcaccaactcaacatcttggcacaaggttgaaagtttggaccagagcaaattttggcagagcaaatggtgttggggtggaaaagtcagcgtttgctcagattgttcttgcactgtccaagccaggtggcttcaggaacattgttcatacttcctaagtcttctgttaagtgagcaggcttattctttccaaagttctctctagatggttgggaggctgttaacagcttagagaaagtctttgtgagcaaaaaaaagcaaaaaacaaaaaaacaaaacaaaaccccacaaaaccaaaaacattatttgaggtggggtataaaatgtttaatcttgtcggaaaaatagggaagcaacatggtggctagtctggaatttctgaaaggctcaccattagggagatagacagtacgtgggtcaaaagggagagtgagaaagcacttctgacacttcacgcaaacctggccccatgcctgaatgtctatggaagccacctccctactgcctctgcactttgactcagtaccttcacctgctgcagagggtgattagcagcaaggtctaccaccacagctgtgggcttcctgctccagcctgcccttggggcctccatcacctcatttcttctggcctcctccccgttccccattttggaacaactgtacataatcccctctcccctgccttccccctccccaaacacccccacctgccccttctggctctgtgccagcagctggctggtaagcagtgccaaatcaaacagatgtgtgtggtattgaccagcacgtgttaccaggctccctgtccagccccgtgcctgatcagggctctctctcaactggccgacaccagaaaccccctctcaggggcactgcagggcctggaacagagaaatggcgagatgctattgccttctggacatcttagtctcccttctcctcaccttgcaattctttttatttctttcagttcagcacctcttcccctgacttgtttacttgtcttttttatttacttatttttaactcttcctcattaatcaagctcctgaacatttaaagaattacagtttaaaaaggcaaaacagggtctttaaaacaagctttaaaattcaagttctcttagatttataaaagacatcacaataggccagaaccagccagaagaataatagcagctggtcttcttcaccgcagctcgcccaagcccaggatctttaagatgtcacttccttccttcctttcttagtggcatgcaaaattcatggtaattctcagaagtaggtagtcttgcaagcaaatggctttgattctctgtacaattggctaattctactcactcccacctacctgtctgagcgaggatgacttgagaacagcagcaattaacccaagagagccctgtgacagatcaaagctctctggagcactgaaatctcattgaaaataaaattatcgagtctagcctaatgatacaaatattgttcgggttttagagtatatatattaaacataagaagtgaaacagcttgcattcttcatagctgctacctaagaaacaatcctcccaacaatgaaaagcaacaatattttagtgattcatactaaagatgatgatttttccaaaataatggccttaaatgttgataatcaacagtgcctacctgaattccacagacatgcatgattttggcatttttcagttgaattgaaaatgcaagattactgaatttggccttgtctacgcttctgaatattacttaagagatcatcaacatgtaagaaatattaaattataataatatgtttcctattttgattttgccctgatgtccagaatgctcacttgaatttgattctcaattcgataattacattagtctttgccacatctttttgctttaatctaaatatctagttcctttttttaaaaaaacccagggtataacttcttttatgttataaattgtccaaaattctttttggaaaaagagatgatataataaaaaagagaattcaataaaaatgacatctaataacaatgatgaggataattcatgacacttcactttctacctttaattagttatttatgtacttgttggaaggccctcattagactgcaaattccctgaggacagagccaggcctgctatgtctctgcatctcccatggggtgggtgtttagtaagattctgttggataaatacaaccttaggattaattttaggggaaataaaatgaggttgtccttctcctttcttttccatgtgtttctctttcttgtcttttttcagggaagactattgatataatgttttacagtcagagcagagctgagttatatggggctgcttttatattgctgggtgagatgttactttctcctctttcccctttgaagcccattgtaaatttttttcttcctctacattgttctctccctcttcctgcataatagtcagtaatgttctcctacataaataataaccacttacatttacataagcatcggtaacactggcacattctttccaaaaaggatttgagatgagcgtcttggaggatttttccattttacaatgcactctcagatgctatagctgttgttgttaactaataatttatagtgtacttaccatgtgccaggcactaggcaagggcgtcttgtacactatctcatttagtcctcacagtaatcctatgggggagctactgacattgtctgcattttcaatgcaaagaaacggtgagggcgtggaacttgcacatgttcacacagccaggatggggcaggaatgggatttgaaccctggcctctggctacaaaactgaggctcctaacctctgaatcatgttatccctttgggtcattacttcaacccagtgaaataggcagaggggaggaatgaggatgaaagtagaggaacagcgttttctgagtgtctatcaatgtccaggacattatgctttccttacaatatctcctttggcccctcagacatcccacaaggtagacatcaataccgttagcgcaaatgaagagacagaaactgtcttagttaacttgctaggcactcagatgagaaggcagggttttatcccaggtctatttggttctaaagttcatatttttttttccgttgtacacgtggagaaaccggcccaagtttacacagcaggttatcaaaaacaacaccaaatctggtcttttaaccgccctttgagggttctggtgtcctactggggtcaaaatgtgcagtgcctggctactgagtgtccttccctatgtaaccctgtggggcagaaggagcactttagtatgagttgacaaagagaaatgccattgaattttcatctcattcagagcagagagagagaatagctttgggaaccaggctagtttgaaacaagggctcctgaagctaattaaaagctagtctggagctgtgcttttcattccttaagaatgttcgacctcattaaataggaaaaagcatgtagaattttctgatttttttctaggttctgcaggggatggggatgctgagtaagtgagacacgtttctacagcttctagcctgcccagtgcctgcaatgacatcgctgttgctgatgaagacttactgttctcaagtgcttatcacactgggaggatggcaactgggcaaagcagacacagaaggacatcatgctgctgactcgtggcttcagactctcagtctcctgtattccttcctcctgcaattgcagggggtgcacaaaacatttgcaggcatgaacgcagtgaagcaaatagttgttcttaggaacaatttcccttggagtctttcacagacacctggagcaaactggtgctcaggggcacaaggttccagctaaaagaaacagaaaagttcacaggctttccatatgtcctctggaaaaaaacagaaagcctcaaagattgttctaatgtttggacttcaagttcacaggagtcagctgtaactcagaggccgtgtgctcaagccatgaagatgcctggaattgagaagacaagagatcaggttggcagagtcttatactggatatcttgtagttttgatttaggaaaccatttatggagcacccactgggtaccaaacactgtgctagcagatttgagtatatcatatctaatccttccaaagactccacaaagtaagtgttcttttcaatttacaggtaaggaaacaggaacaccagctacaaccctcatcttcatggcttttggcccttgctcagttagtagagtacagcctgaggaatcttggttttgcaaggtgttagaactgaaagggatattagagctcatgtctaccttttgaggataatggtgaaaagagatccaaagccagaaatgtaaattaatttgcccagggacacagagcagagctgacacatccactcaggcctctggtcctgcatgtggaccagtcttttcttctccatgtaacagcaggagagcaaagagattaaaatgccatctggggtggatggaacaaatgtcaaggcctgccctggctctctctctaagcaatgattaccacagacatggcggttttcaaagggcttctcacttaatctgctcaccattccttaaaaacgaggaaaggggaacctttgaagttatggaagataaagtgacttgccaatgtacaatgataaaaatgtgcatctatgtctataaaatatgttaagctctttagaagaaaggtgaaggaagagagcaaattgttttggcattttcttatttccatcatcttgtgatctaagttgtctgacactgctaaatcatcctttcaaaatagtgacacttgtttctctccctctttgatttttctccaaactgcttggggttccagaggacagctcttctagaaatgtccctgtcttatctcacaaggcctgcaggaagtgtatagtctacaatcccagccatgacataaacaccagtctttctgaaccacatgcagcattgcccagctctggcatatcggaaatgagaaatggctatatgttctggggtatgactgcagcactgtgtgcagggtgcttaccaagcattagggccgaaaggggttgaagactccttcaaactcttgttttctgaatcaatttttacctgtttttcttctgacccgtcctgataaattttcagatagcaaaccttttggtatagtgacagtcaaagtcatttgcaaagcatagaataagtggtttagatgcttaggtatatttttcactttgaatgttcattctgagccagttttgtttatgtattaaaataataaaataaaggattaaagccatgtttctaagttgaatgaaaaataagatctatgcatatttaagggtgtctccaagctacccttagtcatgctccctacacttcagccactggatgccttgctgactcctgaataaagcatgttaattcccacttaaaatactgctaataacttcttcagtttgatatcagtgctttacactcttaccataaagaattctaagctgggcatttcctgaattgagttaaacctatcatgttcatgatctcacttatccctcaaagggacttataaaatagatagggaagaaatgtttacttccatcttgcagatgaagatactgaggctcagatgaaatggccaccagctcagggtcacatgatattctagatagaagaacaatgggtctcctgaattccagtctagaattcctttctctatattgctgggattcgtgcttaactctcccagatttggattgtatgtttggtcactgatacttcctgtcaacataagtgaaagcacctggttgcttcttgcaggggtaatgaccacataacccctgcatccctgcacttccccaccttgattcatgctgttccctctgctgggaattctctcttctctcctctgaatggtcaactcctcctaattcaattttaggccaactgaaatcacacctactctttgattaattttcttttgtgtgttgccatagtgctgtgcatgcttctgttacagcacatcagtgggcaccaagctgtagccaggtgtctctcatgaagtcacagaagggagggaattcagtgacaagctagaggaaatgcttgttgagatccaggaacagtctttgtttttatatttttatcacttaccacagtgcctggaatatagtagatattttttgactaaaagttgctcagggcctgaaaattaggctgctcctgaaaagaaatgagatggcagacaaggagttatataataaaaatggaaactaggatcttaggcttcaggtttcagagtggatgtcttgaggcattggataacttcctacagttctgtgaatcatgagatggttatgaactctttggagctgaagggactcttcgatcctttttgtaagatgggtctaccggcatttcctgttctgagagagcatgaggtccctcaactaatgccttgagaattgaatgttggtttgccacttactgttgccttagccccgatttttcctttaacaaagtgtcaaaaagaactttagatggagaaaatgaattgagtgagggaaaaagtccatgagtcccagaacaacctccagtttggtaatgatttatcctattctattgttaattttgcaattaagcaagagtactttacatgcctgaatgacccatggattgtatcttaatcaaattaatgtgtctgcaacataagactgattcagtcttcaactattagaatgacaaatgatgcaaaaacctcaattttttttctctcctttctctctcttctccccacaaaaccctctatcatgaaaggtcaactgactgaaagtctgttgctttgatggctaacatgagatcctattggttaaaaagtaagaaggctggctaccgcccctcactccacttcaaaccaactgtatgtgtatgtgtgactgactatgtttgtaagtttggattaaaaaaattgtggttaattcttcttgttgtgtacttcctgccactgacatttgttgctgttgctgtgtagtgaggttgaggctgggtgggagaatcagatacaaatgacctatatatttattccccaattttgactacccctctcaaccactattcttggaaaacctggaaagtagaaaacgatggccaggaatgccagctagaaattgcattgccctgaaccaacccccatgactttgggtcatcttagttgataagacatttgaaaaaatatgactctgcttaataaaatggcatactgtttttttagattataaatcacaagtaatgattttttttagaaacaggcctttgtggtttgagttatggtaactgggatttaaacctccctagactctattcaatcatcttttacagtaacttcagtaaatagtctctcacccttgtccaatccatttccacaattagtgggatacattttttaaaatgttaattagatcacaactcttccctgtttaaaactctttgatgggccgggctcagtggctcatgtgtataatcccagcactttgggaggccgaggtgggtggatcacaagatcaagagatcgagaccatcctggccaacatggtgaaaccccgtctctactaaaaatacaaaaaaataaaaaataaataaaaaattagccaggtgtggtggctggcgcctgtagtcccagctacttgggaggctgaggcagaagaatcacttgaacctgggaggcggaggttgcagtgagccgagatagcaccactgcactccagcctggtgacaagagcgaaactccttctcaaaaaaacaaaacaaacaaacaaacaaacaaaaactcttccatggcttctcactgtacttagaatcaagttcaaagttcttgccatggcttagaaggtcacatagtctgcccttgcctttccccttgaccccctcttttgtccttcctcttctatactggccacccactttccagtcttggggccttcaggctggtcttgatgcctgcttgcctctcgctttttttttctggctcacagcataaggatcactccttcagaaaggacggatcggacccaccatgtaggttatgccatcccttctgttatgtttctttacactatcgtatactttttctctcatcacaaatcataatttgtgattttagatatatttctgtgcttattttttattttatgactgttcgctcagtagccaataagctttatgcctgctttgtttgccttggtatccagttctgggtatataggaggagcttaatgaatatttattgaaagaaagaatgggcaacccattgactttcataatacttaaaattcctcagccataatatggaaatagtcttgtcatcattattctacagctagctatggaattcattctggtatttgtttcacactgaactttgagatgttaggatatcaattgactatggaagaaacatgagacagatagttttttgttttttctttctccactccattcaaagttcagtagctcatgcagtagggagtagagacaacccctgttctttaacccatgaagaacatgaagggtaaccacaccattgtgacatctccctttctgtaaccctgttagttactgtctctgccattaacaagccaggtaaattatgaaggaacacttaacacttttaagtcaacagttgaagccttattcctcaccatctaccttttctttagaaatttcttattgtctaaataaccttggagagatttaaaaagatgctcaaaagttgttagagaagatactaagtgcggaattccactgttctcccaatcctttatcagaaaactcaaggcccagtccctctgcttcctgggtggccttctctttgcttattccctccaagccttgagatatcagagcccagaatttctccagatatgttctcttagaaccctagctctgatttctttctagctcaagaattttttccagggtggacacagaaacctgcagggaggtaagaataaaaagagtcaaaggagcaaaagaagctacaagtctttaggaagccagtgagtatctctgaactttgatttatctgtaaaatcaaagtttagtatattgaccatatcagggcatttaaaactaaactgaattacaaatgtcatagtattttttacagggtgacactcaatgttcaataaacatcaactggttatttctatcactttcaattcttcctgctcttctttggccactccagaacgcatgtgattcagctcaagatgggagaagagtatcacttatagttgaaccacctggttgttaaagaaatggattgagttcaggtcctcaattggttagaagcattgatctcacaccagattttcgatctcagctctgtatgtatgctagattttaaaattccagtatgtggagaggttttaataataagcaaattcaacctcccccgctcattcataactagaaatctagtagacaaagagtctttggttggaaccatcccactgtcttgtttggcatacatgttccatctctacttcccaaggaaagaaaaccctggaaagaatgtgagattaacagaagagaaacaaagatgtcacccaactactggcaaatcccatcatcaaaataaaactttaagcttgctatgttgggtctaaaaaaatggttgggttctcattcaggaagttttttttttctttttttttccccctcaaaacagagggtccctgaccctcaagaagctaagtggatgaaagatatagaaagatacgcatagaagatcaaggatccgccttggacactatgatgtttgcctgggaaacatagctaggctggtaacaccttagatacagagttggaagagtatttcaggtagagaagccagcatgtgcaaaggcctcaggtgaaagagcatgaagctgggtagaggactgaaggaatttaggttgggatggattagaggatggtagacggggattagtcagagagggtggcaggagccagcacatgaacatctgggaagctacataaaaggattaggctccaccttggaactaaaaagtgttttgatcaagaagcgatcacaatcagcaatgctgagtgctgggtgtgacatgtctagatgaaagagaggaaggtgacctggactcaggctgtggcgatggagaaggagaaaggaaaagagatcaggagagttttagatggaacattaatgggacttggcaatgggttggatagggcatgcttgaggaggaggaagctgttgaggatgataactcaagagttttgtgggggtactgagtaccattcagggagaagggaacaccgggcaagaagcaggtgttggcagacaggtggtgtgtttagtgtgtgagccaggttgggaggtctagttagtagactagtagtagtagtaatagttagtattctagtaatagtagtagtagttatagtagtagtagtagttagtagtttagtagtagagagataaggtggagataaagatttgggtgttatcagcatacagataatagtttttcaaattattcttcaggtacaacctataccagacccacctgcagtactcaataaacatggatattacttggggaggatgggataatggctaaagagttgttaaaagttttacctgtgaaatgagcataggaaatataaatttgaacattctctcaaagtaatggccacctaagtaatggtgtctgaatattcctgacgtagagtgatggcaaaacactgctggagaagtaggaagttctccttttatttcatcttttctccccctttttttttcttgttatccattccacaccctttgcctccagcatacactaattctgtttgttttgtttcttgggaggaatggtaaaaatgaggcccagccccgttcttttttctttcatgttttcttcttctttttttagtctaattcgggacaaaaaaagctttcatcgaaagagcagatgtcatatgctttggtcttttgtggtggttttattttattttattaaaaaaaaatcctcctgcagatgaggctcatttaaacataatgaggaggcaacaaaggcgtcgcacagaggagcttcagattcggtttgactcaggggagggagaacaaacaaggagatgtcctgtccatttggctttcctctatagggcccagagcagctgcatttcagatgcaaatgggagatgcaggaggtggggagggggagggtgtggaaatgcccaggaagctggtgtgcaggtgttaaggattccaggcatcgctgcaacaacaggctctgaaaacacagagctcccagacagagcgggcttgagagtgcttgcttggagggctcaagtggacccgcagctgcactggacattcctttttgtggtcatcaatgggccctgtattgaaaatatgaaagtgagcaactggcacgttcagagaaaggaaacgctttggaaattgagcaaacgctaggctgaaggggccaccccttggctgccctgattacttaaacccacgtgcatgcataaaacagatactggatataggatactgtgactcctggggctggaaggaatccatggaatcatcaaactcttctctcccattctatggtgagaaaacatgctccaaggggcggagcgatttgtcccaggtcacacagagggttagtgagacagagaacacaaaatgggcaacagtgacacttattgagccctctctgtcctagtgactattcaatattataatttttcaaagtgatttacccagcagacttatgagctaagttttttatttccattttttagtatggggaaattgaggctttagtaaatttaaaacttgttccctgaaatactgttagatagaaggaataagttctagtattcaatagtacagtaggataattacagttagcaatattttttgtatatttcaaaatagctaggaaagaagagttataatgttcctaacacaaagaaaagataaatgatgtcggtgatgactattccagttaccctaacttggtcattacacattgtacgcatgtatcaaaatatcacaggtatgctcaaaatatgtacaactattacatatcagtttttgaaaccttataaaaataaaataataaaataataaaaacataaataaaataaaaataacaaaaaataatacaatttgtcccaagtcaaaaagctaataagtaataatcaggatgtgaatctaggtgtgtatgttttattccaaaattcatgcttttttttcattacacttcattcctgactcataggtagtgttttcttctcaaacacaaacacacacacacacacacacacgaaaatattattgcatatatgtccatagtttcatattgtacatatgaaaatattatttctctttccatttgtgtaaaatgtactaaaatgtatatatattaaaaccatgaaatatgaaacattttccttcagacacaaacatactacagcactgtctaatacagctttgaaatagttacttatggttggtgataatccctttcatgtaatatgtattcaataactattcgattttgaattgttcctttttattggaaaaggagcatttcattagagccagaaactactgtccaccaacattattatttctgtgacttccacacatttgcattgtgcctgtgtttatgaggtgcatttgcatgcattaattcaatacttattgaattaattaagtaattagttggcagtacctatgtaagaaaagagtaagcagggccactagtcccatcttatagatgagaaaactgaggctcatggaaactaatcaattttcccacacaaggctgatggtgaactcaggttgtctcatgccagcatattggcagaagctgttcagtgaggaccatgctgacgatagagatcagagggagagagccatgagaacacaagtgcacttatttccctgctgaaggatgctgtggtccaatgtgtagaactccagatttgcagacagacaacctgacaccctgtgggtgtgtgagtgtgtgggtgatgctgggaggtgcggggatcacggagattgtgatcttggtgaggtgaggctctgtgggtggctttctttgcacaaatgtgtcaccctgtgtgcctgcctgaggactatgacaatgctcatacgaatgcctgcaaatgatcacccatatgggtgaatgatacccatgactgtgctggtgatatggccagagtcctgggtttttttgggtccttatgtagtgcactggctttcagtagttttgtgatgtcaacctgagcttctgagatcagcctttctgcagtgtcagtggatccagagttccactctctccttgggaaaaaataacccagcaatatctcctactacttagagggccaggagtgtgacatgtgtatttgaagaatgatacagtataaaatctgaggctgctaggttttaaggcacctagatcagatacatattttatagatgaaaacactggagaccagagaaaaaattgcttgatttattactttgtgcctgtttttgatatttcatgtattccacaaacatttgttgagtaggtattctgtggaaggacctgccttcaaggatctgtcagtctagtggagagaagcatgcataaacaagtcacaatgccaatcggtgagccaagtggacatctgagaggcccacacagcagagacagcatttgaacccaatctggaaagatatgcagtcttgcccaaggtggagaagtgtgtcgctgtgagaaggagtggcatgttcagagacccaggggtgggaagtgtgagatctgataaaaggactcttgaaagctggctgaaatgtagggtgtgtctctgtatgtatgagtttatggggtggggtcagcaagcaaagccagaagatgaggaggtgctggatcatgaaaggctttatacaccagatgaaggagtctagactgttccgtagaaactgggaaaaccttgaaggatgttaagcagagggatagcagaattataaattagttttgaacatatcattctgtgcacagtctagaaaatggactggggtgaccctgcaggcaggaagactggtctaaccttgctgcatgtgcaatatttggggatttcaaagtggtggtgtgggtggaaaagattgtctggagtcgaggagagaggcccaggtggctgtcaggattagaatccatgcacgctgatctcagtcatacgggatacttcttaaaaaaacactccatcaaaagtggcattcaagtgtgctctagtgcctggtctgaaagcctccagaggagagagaatgctcagcatttgttctggaagacatccctgggtaggcagggagttccccacgagatgaggtggagggagtcatggagaagcactcaggcccctgttcacttgcaccgtttcagagccaggaaccagctagggccaacccctttttattttggagtcatccttcatcagatatagtgttaactcacttcctttttagcccctaccccgttcctaccaccaccacctccttgctttagtcactggagctgagtcatccttcgagcctattcctgtctccccgcactgtgtcagggtgaaagggtttgagcatgagccactgggcatggacattcccatctgctggacaatctctgtgacttcaggaaagaagagagaaaaggagctgatgtagcctgggtacctcctgtgtgccacgccaatgccagactcatcaacatttatgtcttgtcacaattgtcttaggcagtggtgttatcctcagatggggaacatgaggctcagtgaggttcagtcattttcccaaggccacacagacctgaaggatttcaaagtttacactatttccaatatattactttgcctctttacatcatctctgggaaaggatggcatttgattcaactcacagtttagtacctactatgtgcaacacactgtgccagaggggttaatagagggttcctgctgtcaaggagctcagcatctcatgatggaaacctttgatccttagatttattcactcaatattatttgagtactacctacaggcagagccctcttgggggatatggagataaataacccaggatctcagccctggcacacaatagcactgagcacaggatgctgtgggaaaacagaggaaaggatatttaatagtctatgaagaattcaaggaagacattgcagagctacttttagactgacattgaagagtgagtgttttgatagacaaagaatctgggacaggaaaaccagcgctgtagaaactacaagcacactgaagggaagtacaagaaacatcaggtataaatagagagtgggagtggctggcagatgatgggtagttgttgagcagttgaaagaagctttgaaagccccactcacaagagaggaattcctgaagtcttgaatagttgctcattcttctgttgacccatcagctcttcattgcatgtttcctctacactaggtgctgggcaaagtgttgaggtacagtggaggctaaaaagtacgaatagggccaggtgcaatggctcacacctgtaatttcagcactttggcaggccgaggcaggtggatcacctgaggttgggagtttgagaccagcctgaccaacatgaagaaatcctgcctctactaaaaatacaaaaaaaaaaaattagccaggtgtggtggtgcatgcctgtaatcccagcaactcaggaggctgaggcaggagaatcgcttgaacccgggaggcggaggttatggtgagccaagatcacaccattgtactctggcctgaacaacaaaagtaaaactgtctcaaaaaaaaaaaaaaaaaaaaatatatatatatatatatatatatggatagtccccaacatcaaggtggtcaaagactcatcagacggccacagttcaatggatgcttgcaaactgggatagtgttgagaaggaaagacagatggtgtgagagaccacagaacaggaggaattgttttaggggagtgttgatgataagaaaggggttatttgaagaaactgggtttaagctgaatctgaacactgaataggagtaattacatcaagtgtgagtgtgagtgtgtgtgtgtgtgagtgtgtgtgtgtacgcgtttgtgtgttgagagagtggctggggtaggggatagggacagggaataatactgcttcagaaggatgctattaacaaagagaagacaattgatataacaaacattctagtaaaataacagcatagggtggccgggaaactggtggcaccttgccggggtccctgaattcaattatccaggccatgcctttgtgttcatcctgggaaacagctgctaagccctggtctcagagctttcactgacttccactcctggattttgctgtgtgactaggatgtttgttcctcagagtcttcatctgtagagtggaatagaacacacttacgtgactttcagaatacagaatctaataaaaagtgacaagatacaagttgtctatagacattcattcaacaagttggagttgatgtttagagtgagagaggagctttggagctttaattacacacacacacaaacacacacacacacacacacacacacaaacacacacacacacacacacacacagaggccaggacttaatattgtcagcctctagtagacagatgtgggtattcatttccatactcacatatctctaaataaagaggtgggctctgaagagctgcagggcactgacaccatcactgtgctcctcggcatgctcctgaaaagagaaaactgtcttcattttctctctctctctctgtttttttttttttttttttttttttttttttgagacggagtcttgctctgtaactcccgggctagagtgcagtagcacgatcttggctcaccacaacctctgcctccccggtaccagcgattctcctgcctcagcctcctgaatagctgggattacaggcacctgccaccatgcctggctaatttttgtatttttagtagagacagggtttcaccatcttgaccaggctggtctcgaactcctgacctcgtgatccatcagcctcagcctccctaattgctgggattacaggcgtgagccaccatgcccggcccattttttcttgatttgtagcaccctttttcttcctggggctacaaaggggtttcagtttggagccaaagtgcatcagacacaagcattagtgtgtgaactgagactagagtccagatttccacagcactggactgccactttctgggagccaaagccctggcagtcttcctgtttgttgtacaagagcctaagaatgctcagactctgtaaccttcagagacaaatgagaaaacatttccatgttatttgataagttcccatccctgagagcttgacagcctgacagaatgtcactgtgctgtaggaacaagtgtcctgaagttggagcatagcattttgatttctagctttggttctgccataggctgtgtgaccttggacgtggtcatgtccacaatctgaggccctgtttccccatatctaaagcaaggtgggtggtacgtgatttttgagtcttggtagccttgacatgctatgctcctaggacatgaagctctcccagaaggacactgggtggcatttaacctggccttgacctaccagtcgcctatgtttattgtctggaagagccttctctctttcttgctggtgttctgtcacctaaaaccaaactacaaacaagttttctccacaacactttcagtaccagcatttcatagataatttctagatagtttcaagattttctgttgagaaaggcccagtggctctaaactgatgtcaaattatatttgatgcataatacaggcagtgtagtgttcaatcagtacaggctaagggaaaggtgatgaacagcatgatcaagagtagctggggtggagatgggcagatggattgatttggtccaaacagccaatcattagagctttctcttttatctctactatccaatactctccttccaagtttctagctaagaacaaacttgcctgacagataagtttgcttgtgaagattaatgtttttcttttcaagatattcacaatgatgtgtgcaaatgtatgtgtgcatatagcttatattcaatacttttttttttttttagatggagtctcactctgttgcccaggctgcagtgcagtagcatgatctcagcttactgcaacctccatcccctgggttcaagcaattctcctgccacagcctcctgagtagctgggattacaggtgtgtgccatcacacctggctaattatttgattttttttaacatcacctgattttgattacatctatgattcctgcaattggtccagagcagggaaggaaagtgacaaaaaccttaatacttaagaaagccttttatagagggcttttctgatctctcctctactgaagacttttagaaaataagaaagtagacatcatcctcccaacttaaatcaaggcaaccccaattcatgtcacttccttggatgctcatgataactctgtgaggtcggtaggcctggatgaggaaacagagactctgaaagtcacccagctagcaggttgcagcagtagactccaactgctaccttaaaaaaaaatatgtagttgtgtaagtctcaggagagcatgcgcagtattaatagaattttgtagatgaggaaacaaatctccaaagtgttccctggtttgtgctttggcctggctgtgctgttgattggacagattcccatcacactgtggtgcttctttctgttccattatgaacgttaccactctggtgagacagttttactcacggctcacacatctgtcattctctgtccctttgaaaacccatttcatggtccagtagagcagagtttcatccaatagcactattgacttggtggcttcaaagtgcagtgcccacccctggctgagcttggggcagtaatgtttaacagtctggtagttaaattagaagcaataataacacaatagtcaggtttggttctaacacacgaatgagtcccaaccctctagctgtaactgaaataagtagaaggggaggaatggatttgggattcttctgtaggattcctgatctgttcttctatggccagacagagcaagaaaacccatgggaccacaacacaaccccatgattggaaaaacttgtgttttacagaccacctctcaagactcaatgctgacaggctggaaataaactagaataattaattctaaaatagtcacgaagacaaatcttccctccaattcagtccaaaggtctggattggcttaatgtctagagtgtgtgctatttgactatttctactaaacattaattaaataatccatctagctctggcccccagagctccagggtccccagaagtggaatatcctaactggtatctgtccctttccaagttagcccttgtatgagtgccccgctgagatgaggtagtgggctttcagcattcagtaccctccgatgctccaaccagagcagcttggtttgcggttcacctcaggacaatgcaaactgagctatgcatttactgtaattctaatcagatgattctataattggaagaacaccagtggcattctgtctttggagtcttttccattaagcaattgaacaagggccaggggacctttacttgtcccaaacgcagatcgtgatagagactctgagatctggatactatgttccattctataacaggatcaagttcttaattttttcttggtaagatcataaaatgtgtgtagcagtcatttcacccgtactttcaataaattctgaccaactgctctcctaacaatgaaaaacaaatgaaatgagcaaagtgtttgtgtgtatttgtggtggggagtgtgtgtatgtatgcttgaatatagtgactgaatattttaggtaaatatttccaagtctagattataatcatatatgataattgttgactaaagtaataagaaaaataacctgaatttcttaatctctctagatacctcaattagaaacagaaagaaatattatggacaaatgcattggggaactaatttgcagtaggaactgtgcaaagtattgcgttgctttcggaaatataggaatgaatcagacctcgatcttgactttgaagagctcataatttaaagagggagataaatcatgatcataaaaatcataatctaagatagaaagtgcagggcctgtggcactgggatttagaggaaggaaagtttactccctcctgggaagctctggcttggctttttggaggatacagactttaaagcatgggaaggatttggtccaaggacaaacaaggggaaggaataattgcaggagcaaaggcgagatgtgaagtgagaatgtataactggacagtgttgccttcacaggcagttggggtaaataaaggactctaccagtgacctgagggatcttgttaaaatatagattctgatgcagttggtctggagtggaacctgaaaatttgcatttctaataaactctcagatgatgctgatgctgctggttctcagccccctctaagcaatagggaatcattacaggtcttagacagtacagagttcctgttatgaccttcaaccttggaaatccctttaaggagacattttgaggttgcggacacccacatgatgacgagtacaacagcatttgcttttccttctccagttgtactgatcaaaataaaaacccagttaggggtgaaaatggacaaggggtgaaaaggttaactaaagacctggattctagacaccagataatacacaaaccacaatgtaaatgctgttttggtttcagaaatggtttctcctcctaaattgttaattgaagggcaaaagagagctgatgagtatctatatatttgagagtgatttagaccctctagcttgattgttaatataattttataataagatgataatacttcagtagtaccatggggaaagaacaggaattagaatcaaaagatctgaccttacattctttaacctctctgggcctcagataaactttctcatctataacacaggagaaaaatcccttccccagctacctctcagttcttcataaaaatcaaataagctaatgggtatgaaagtgctttgcagactaagaagtgccttgcaggtgtgatggctaccttttgttattatggatggaggcattagtcttttctctgttcctgggacttgctggcagaatgagttagtgcaaactctgaggagaaactgtgtcagcctcaggggcaaggccccaggtaatatggcatgagagatcctcctgtagagtttgcgtctcctgtcaaagcaggatgcacctgctgcctgtagatcagacatacacttgcatctggttgcgcagcttcctgtgatctctggggaaatgttatcagcagcaatattgccatacagggcatcccctgggagtgactttgggggcaagacttatgtctcatgttctctgctacccactgaaggctattctggccaagcccccagagcaggtaacagtggcaggtaagaatatttgttaggtaagaggaaagtccagagcatgaaggctccaaggtctaagaaaaaaattagcaagacaccaagaagcatttttttagcaggaaaataggtggcattcagagagtgaatagggggacaagaagataactcctgagagccaaacctacaaagtcaatacctggaccagaaagctcacttttcaggagaactctactgcattttacatgtaatagaactgagtgtcacttaaggtaacaggcattagaaatcaccatggaggtcaggttcaatccctgaattgcctgtgaggaaacaggcatttggtaaaaaggggcttgccctgagttaatagaagatcccgggataaatctcagatctcttgattatctttctcttgctgtttgagaagggccatcctttttggccctcctggcctaagtttcttcatttcaaaaatgatgggaaagatcactgtttcccttgtgtgctcttccagctccaatattccatgggtcccagagacccaggcttcagtccaggcctagagcatctccccattcaggccgtgttcacaggaatcatagcctctccctttattctcccctggggaatctgcagtaatgcttaatccccgctcccagactcactttcgcaaggggaaatcaatagattcttcaagtagttggaccacagaatgatgcctgggtctattttgtcaaccaggtggctctggtgaaggaagttgtgtgagtcattgtcggccagaaatgtaaatctggactgaggcttcccttgcagtgaaatttgggtctttagtaacagtgaccttctgtacagcacgttacagttacaaaacactttacatacttcatttgtttatcacaactattcagagacttagtgttattgttatgcccattttacagaggaggaaaatagacatgggcactatggcaatttgcccaaggtgacaggaagtgtgagtggcagagctgggactgacttagtgaagtctttggaccttataatccgtgacctgcataccacatctctttgtatcagggttcctattgcctactcagcctcagtggatagaaacaaaagcaaagaaggtcaacctgcttggggtcatttacatggacatgcatttctggagaagggataattgcagcatcattgtggatattacagtcatggagacaggcctgggaataggcagatatatgggactgacagcctctgtccactgctgtccaccacccactgactctttcaccttctgtttctcagactaaaactcacccttcctgatttaaaaaccagggcttttcttcccattgtgtaaaatatgaagcataatccaaacatgtaaaaaaggatgacaagtactgtaacaaacatccatcgtagtgaagtttcacgctgttagctaaatatttccagttctttccatttctgggaacatggtagaattgcactcctggcccttgagcaaggtaaatccaggtgctagtctgggccacttagctgtgaaaggagacagcgtgtgtcacttccaatctggagcatgtaattgctctctctttccttctggtgcagctgccagcaaggaggtggtgactgctctgtcagccttggtccctgagtggcaacaacaagcagcaccttctgccaacctacaatgtatgaaataaaaaaagaaatctttgctcttttaagccattgagatttggggtttctgttattgcagcaaaacctaacttatactgacccttacattcacattcccaccaccatgattttttgagaatgttaacatttccttatacctggttcagctttttaaagaagcgaaatccaaaaataactgtatcctttgtcgcttgcctccttccagcccttttccttcctccccagaatagctaccgtctcaaagatgtatgcgtctgtcctgtccatgtttggtagatttactccgtaagtatgtgtacaacacaatatatagtattacttcatgttactaaaatttgcatgaataatattgattattctaaaaattgcttttgtattcaacattattattttagatgtatcaatattgatacgttagtttcagttcactcactttaaatttgatataatatcccttcatatgaatgtatcacaatttataaagccttttcctactaatgaacttttaaattacttttttcttttaaaaacaattctcttaaatacaaggctttttatgtaggtatgcaagagcttctcttggttgtatgcaagagcttctcttggttgtataccaagagtggaattgctaagatataaggtctactaaacctcaaatttgatagatattgccaaatttctatccaaaatggctttttttcatttacagtcctatcatcagtgtctacatgttttgtcattgctttatcatgtcaaacatttcatgttgtccgacttttaaaattttagccaatctgatgggtctgaaatggcatctcctaattttttattttgcatttctttgagtatcagtgaagttaagcatctttccatttcttttaggattatttccttttcagagttttccttgttgatatagactgatcatttatttctatgtttttttctccttatggatgtgtagaattttcttcctcctgtgttctgggtactaatccagttacataaattgtaagtgcattttctgcatctgtgacttgcttttaattttgttctttgcccagttatccttctctcgcaagccattggctgcctgcttgtgcacacacttgatttttcagatcatagcaactacatggtaaaaatggcttggaggcgtgttttgaaaaacctaggtgaataaatgttgcttgctctaaatatctgtagtaggatatggaatgtgtttttacaagataatcggtgaaggacctgttttgcttactcaaggatctcatttgctaacacgattgtgtggtgaaagcaaaagaaccaggtgtaagtggaaaaaaccttagtcattaagagttgtttgggctgctcaatggtgagtatcaggggtgactggtttccccctgccatgatgaatcctggcatgatttgcctggctgttttgacattttgtagacctagcatatgtgggagggcacttgaaagacgtctcatactcaagtggtctctcctcttcccatacacaccttacggattcttcacagggtgtgatgatgggaagcctagacacgcttatcagaaggtaggaaaaaatggtgtcttggaagtgcttgtagctttccaatgaggggagtcactttaaagctttgtttatctttctgtgcctcagctaaccccagaggaaaatcttagctcaggacaggaagctcagagcacccaaaaggatgactactgcagtgcaagactatttatgtctgcctcttacatatccctccgtgttctcccccaggaggcctgggctgtgctgcagctccaaggaggcctgcatatatcatcactccctaggaaaccaaggggtatggcagaaaccgagctctgggatcaattatactggtaaaactacaaaggcagggggtgagccagagtgttgtggcttaggaacaacttgctgaaaaaagacttgatgttcccaagtagaaccctgtggccccaggggaggtgacctcggctgtctggtcaaccagccagagtgctaggtctcagaagccaggacacaccttccgttccagttgactcacttgagtggcaaattcttttctccctcacaatcctctcatcttcaaagggaattcattaagccccaccatgccatcggcacttggccaggtgttatactggcccattaggtggacacaggccgtagccccagggagcatgccaaatgaggtggagggtggcagctgtgacctagtgacatcccctgaggtggttttgcagcaccttctataaaccctccagctgtttcaaactatttgtgtggggctttccacacaagctgtgttctctcccgtccccttgctttagttcactcttttccttttgcttggaatgctcttccactctatctgtcaatgcactcaaatgcccactcctggatggagactttcctggcaaccccaggcagaattagccactcccaattctgtgtattctcatagcactctgtatcattaatatagcacatgccaatctgtgctggaatcatctgcttatatgtctgtctccctaatggactctgaattccttgaagatgcattctgcgacttatccatctttgtttcttcagcaagaatttggttggtgcttagtaaatgtgtgctgagttaaatgcagaaagggacacagctcatgattttatctgattttaccttgtggtataactggaagcaggtcacgtctgtctgagttttagtttccttttctgtaaaatgggtggggggaggatacattagaaaatggcctctaagaggttttctggctctactgtctatgattttaaaattctagtctcctattgaaaaaccgagagttcatcataactctttaaagaccaacatgttttcgtttacatgtatcaaagagcctgatgttcccttcccacctctagtctgccacctataaaaaaagttgtgtattgcttagcagtttgcaaattttctgactgaagtttcaagaggtttgtgggattgattgattacaggaagcgtgtaaattttatcttccctggggaataaaattgtgggactaattgattcttttaaaggcttgtattttctggtgattttgtcagcctgggtacatgtggaaaggggtcttgtgtagctgcttgtggcatccctgtgtctctcttctcaccacaatgcaggcgtcactgcacgtgccacacctagtagtctgtgtcccatgaggcccatgcttttcctaggctacctctctgccccttgagttacatgtttggaaattcctgcatggatagaactgagtacccctcgccttctgagaacatatttacaaggtgctaataacacctaactatgatcttagaactagtctacatggtgagtcagacggggcttattttcgacccatttttcagatggaagtaagacacagggaggtgaaatgacttgcatgaggtctcacagctaggaaggtcttctggacctggcttaataaaacccaatgttcttaatttcatcaactcctttaaaaattactttgattgctgctttcttgattggctgctctcaggcctcttggctgatgaaaccagaggcaggtgaattctaccagaaggaaagaaggggttctaacccactactgattttgtgggacaaagtggctgcattcattagtgaagggggaagtcagattagttaaaactgtccatttggtggtttctatcattagcatctcactatgccagtaaatgagctgttgaagcctgaagtaggggctcctcctgaaagctcgagaggattccaaagctgctgggctccgtggaggaacatccaggagcacatggtctccatgttcccttttttaactctacaaaggcagctaagagggagcgcaacttgttactgcacatctctgagtgtcagtttttctatctgtgaaatggggataataaatcctccctagcttacctcagaggatggctgtgagggtcacatattatgatggaggtggcagtgctctagaatctgaaagtgcagggcaaaaatcaggtaatatcatttgctcttgttattatacttttttttttttgggactgagattcactctgttgcccaggctggagtgcaatggcacaatctcagctcactgcaacctccacctcccgggttcgaggaaatctcctgcctcatcctctcaagtaggtgggattacaggcacccaccaccacacctagctaatttttgtatttttggtagagagggtgtttcaccagccaggctggtgttgaactcgtgacctcaggtgatccacccacctcggcctcccaaactgctggttttacaggtgtgagccacggcgcccagccttgttattctactttcataactgtgaatgatcttaatgaagggaagtaagcccagcttgataggtgtttcctaaaagtggcccgaggtgacattatgtgggaatatatggatctatgaagtatgaacgatggcagtttttgccctaacctacccatcagaacactggagaagactcaggtagataatggattcaagggcattgttaaatgataaaaattatcatgatgatgacttttttttttctctaaggttaaggatatctcttaataacttgaaagaaatgtactcaaaccctctctgatgctattttcgtcatggccctacctcatcttgggagtaaagcgttccacttggctgagaagtaggagaggggctgggtcggaactcatctgctcaggttttcttcctcataccattcggatgctctttttgagtcaatggctctagctttttgtaatgatctataagcttctggctcctttggctctaactagtccctgaggatcaattccctttccaaagagggtgggtttttttgttgttgttgctgttgtttaattttctctcttttatctggggaaaaaatagccactgtcatagactgtaaaaaaaaaaaaaaaaaaaaaaaagctgctttttgggagccttaaaaatatttgaaataaatagggctcaaccttaacttaataatatcaagtgaaaacatacatactttttattaccagagagaagtagaggcagctttcaatatacgggacatgcaatgggatgttacactgcaaataagaagataaaactagaacaatagcgagaaagccaatgtgttatgttctaaggcttggtgtagttactgcaactgagcatgaaatataaactgagcttcctggcaggcaggacaaaaaagtaaacatgatgacgtacataatattctttttctgattgaagtatgtgtcctgattatttgagagacatttttcctaatattaattttgaaaaggaatgtatcactgagtacattatctgagtatattcattagaagagtaatgaatatgtctttagcaagagttttacatctaatgaaaaaaagttcttatatttccatctcattccttgttttgaactgcaagcgcatattaactagtgactaaattttttcacttggatatttcagagtcatcctaaactgaacatattccaaactgcattcattaacttctttctgaaattggttcctctccctgtgtttattatcttggttaaagcatcacacacataagctctccctgtcagaaaatctcaggttgtttagatgacttcaccccaacctccagcccacacccagtgaatcctggagacactgtctcgttgatttattcaaaatccttcctctcctcttcacctccaacacccctgcttcagttctggtccctatcgtctctcatctagcctatttcgatgacttcttaacttgctttcttattgtttcagcttgttctctacactacctctctacaaactcatctataaaaaatgcaaacctagtctttctgaataggctgcccgttgctttcaaggtgaaatctaaactcatggcctggcagatgaagactttcacctgcttggttttcagtctgatctgctgccacacccctgacagattctctgttccagtaacacgggctacttgctcccccggtgcacatcgctgcccctgtggccatgttttgcacaggctactacttctgtccagaactcctgccacctttgcaaacctggtcccctcctattctaggaagctttcctgatccccttccaacagccaccatagtgtggttttccctcctttgtatgccccaatacctgtgtaaatctcagttatacttaccacatggtgctgcaactgtttgcttagtttctgaattctccaagactaacttttcaaagacaggaacggaacctcagtcatcctagatttccagctctatatatgtgcttgacacagttggagcctgataagtatttgttgactaaatgggcagatgaaagatagaataatgctgtacatggagcaataaggttgtctttaggatatgttaactggtgatacagaatcaataggtgttgtgttgatcaacagaacttttcctttaggatatataaaggactgagtggatagacagtgctttagacaaacctctctgaaatcatctctttgtgctggctttgggtgggtgctggatggcagacagtgagtggctatgctgttagcagaagcctcagtggctggcattctgtgtgcccaacctaggcacagctgtatattttattcatcttatgtgtgtttgggtagctaagggcagtgatattgcatgaaggaaagaaagaagcctgaccaggaagtggattataaaggtatctccctgcacagccaggatttccctcaaaaagtattgctttctatcaagtacctggcagagaatcaatggagaatcttttccttgttctgctccatcaagtttcacaccatataaaattttttttgaccaagtcctgcttgtaactgaattaactggggtgcttgtttaaaatgcagacccccacccaggcacccccgccaacagaccctagccttaaatatggcctcaaagttggttggggaaaatttttgagcatagtccattgcccagctcttcagggataatggtaaagccctagaatgatggtgtctgggctggatcatgtttttaacctccacaagttacttgttgtgaaagtttgtgggcaaaagcagttttggatgctcctaggcccaatgtaatagagctactccacaggccttaggggccattcactttatgtctcgcaagccccacctgagcctgactgaacttagcagagccatggtatgggcttgtgctctagatagaggactcaagttcctgtgcaaggcttgcctagcacagcatggattagtctagtaataaacttttaagcaagtcatattaataattcaaagccaaataggattttgctgtcctcaaaactcttgcacttgcattctttcctttgatctcacaatagccctggaagcaggcaaaaccagggctcttcccatattgtagacaaagaaactgagattcagaaatggcaggtgacttgtgcaaggtcacacagatgggactgcaactgcctgatctaagattctgactccattttcatgctgtgctggattccactgtgcttgctgatctctcaagtcatcagatttgaaaagaacattactaaggatgttagaactacattttagggctcagggatgtccataaaaataagaatttccatctctgaattattagagcagacacttgtggctgaatgttacaacttgagtcccatatgtcaagaaggcttgcaaagttcattatagggtcctaagcctccagagaagtttccagtagtatgttgacttgcataaaagggagagacagtggtgggcatcttttcctcactccatggttattgatgtcacattgagagcttgaatgtgccatggtgcaagtatttataccacagaaatcagcaaaacctataattcagggctttctcaccactgtagaaccagttaaacattttccagcttatagctcatggtgactgcacaaattagagtctgaaaattctcctctgtcacctgcgtggcacaggcgttgattttgcctctaaccacaagtcataccccagtgcccatctttaaatgggagactccttttatctgagcttgcaaaatcagattcatgggtttctactaatagtcccttgcatttgtgtagtttgtaacgtgttttcacatccctcatcacttctgaactgggtataatctattgggcagatgtcatctacccttggtaggacagaagggcctggagatctgacaggtaatgtgaccactctcagtgtcataggcctgtaagtggcagccagggacttgaactgggtcttcacctccttgttctgtgctcctttcctttgtactagctaccttcacctaggacacttgcaatgtctggagatgaagccactgtctagggcgcagagaagagttgcctagcagcagtgtaacattggagtgtgacttagccattgacagaaaagaacagacatgctagcttgagagtatccacacttaactgctagtcccactttactgatccaatgcaaggaaagaagtctactttcacttctcctctgtcttccatcttctctttgtttttttttttaaaaaaaaaataacttttatgggtactttgtgtctttaggtcctgctgagggttctgagcacaacagatatttggagtctcctgaatgatgtagcagtaatgccctgttccgcctgttgcataactcccagcctcatactgcctggtgatggaattattgattgttaagcatttcacaacacattttcaaaacatgctgaaggtcaagaatggatgactcataggcagtaacagttccttctgcctcagtccctctacatgatattggtgaggttggtaatgaaagtcattgaagaaattgaggcaaaagttaactctgtccaatcctggccagcaggattattaagtaacttgaaaaaaataattcctgatactctatttatttagtgattgatcttctaaatcagtttgttttgttgttgttgtttgattgattgatttttttgagacagtcttgctttgtcacccaggctggagtgcagtggcatgatctcagctcaccgcaacctctgcctcccggttcaagtgtttctcctgcctcagccccccaagtagctgggactacaggtgtgtgccaccatacccagaaaattttgtatttttagtagagatggagttttgccatgttggccaggctggtcttgaactggcctcaagcaatccacctgcctcagcctcccaaagtgctgggattataggcgtgagccaccatgcctggcttcactttgttttttaataccaagtctcataaatagtataaagtgggagttaagggatttcagtgctgattttgccactaacttgttcaaaagcaccagagagtaccactgaggtactcagctgaggaaaaacacttaaatgatatctagggaactttactgctctgacagtctgtgattgtacattagtactttagacagcagagagataaaccctgattccggtttacagataattactcatctctctgcctgaggccaagaaaagccctctgtggagcagtgtggaagaatgccttagagcacagtagcagagagttccagacccggaggcaaggggatctgggttaactctcaacgttgccaactgtgatttgaatcttctgacagggtgctgggcctgctagcatctcagttttctcacctgtaaaatggagacaataacagtgtgtgagctttttttggtacaaacgttaatgcatgaaaagacctacaacatgtttccgcatgggctagttgaaagttttggaggaaaaaatatcaagctgataatttttaaatttttttttttgttttgaggcagagtcttgctctgtcacccaggctggaggacagttccacgatcttggctcactgcaacccccgcctgctgggttcaagtgaatctcatgcctcagccttcccagtagctgggactacaggtgcgtgctaccatgcccggctaatttttgcatttttagtagagatggggtttcaccattttggccaggctggtctcgaactcctaaccttaggtgattcaccccctcctcggcctcccaaagtgctgggattacaggtgtgagccacctcgcccagccgtaaaattcttaatatgtaagtattttcttcaaaaatgaatctaatttgcataactaaagtttctgaatgctttatctagaataatcatgggactggaagtttcttaatagttcttctctaggtttttgcactttaaataccctgcaggtcttttcattctaatataacataatcacagtaataagaagtgtgacaaagctctagtagttcatggtgcctgtgcctcattcactcgtcagcgaagcctccctcagcatcccctccccacatccatccctgcacactgcaccctctccaagctgctgccagccgtgctgctcccctgcctccttactggagtgcaagccagtaaaaaaggaagcaaattcggttatgtaaagcacattctgggtaaggaaaggcaagcatgtgtttctgcttgactgaaattggtttttttttttccccaccagtttgtcctcttatcgggatacgtcagaaattagagagaccctggcaatcacagcttccacctcctcattttacaaatgagcaactaggctcagagtacagaagtggctttcccagggtcacacagccagcttgtgacagagtcaggattcaagtaccatctcctgacttctccattgcaccagacgtcgatagaacacagagaacctaaaagaagaaagaaaaaaaaatagagcttttgggaatatattgggcttctggttttcaaggacaattttatgataagtagcaatgatgcctcaaaagctctggtagctagcttgaatgaacttatgtaataaacatttatcacagaacatgtgtcatcaaacacctgccagttctgagcgttggcaccaaagctgctttcattgtcaaagaaaagagggggaaaggaacttggctgaacaaagctggcagacgtttatactagaaaatttagaggtaatttctagaggaacagaaacacattttcaaagtcttataaaatttatttaaatgtgattgggtgaatttagcagttaaagaagtgaagaacactgaggtccaattggtgcctgaggcttcttccaggacccagtcttttctgtctgccttgggcacagatttctagatgcctgaagatggacaggcccagaggttgcccagagtgatgtctgagattactgatctctatctaggcttccatagaaacacatcccaaaacgttcttggttcttattggaatctcatctcatttgcagaacatggccagagtcaaagagacatggaccatgtgtcactcagactgagtccatccatacaaagagaattctctagcctgtattggaagtcaatctacatcagcatgacagggcatgtagccgaatacgtggccacttccctttggctacccacacatttttgaactgcaagatctgttctttatctactcatctaatggttattactgggagagcactggactataaattctgttgcacttgcaggtgtaatgagctctttgaacctcagtttcctcacccatcagatactattcattatctgccttgcggacaacacctagttgttgggaacattgcatgaatggcaggtggaggtgctttgtaaacgctaaagcctgccatgaatgtgaaggagtgttgctactcttctgtgcccaacaatgtgctagcaccaagggagttcaaaagaaatgtgagacatggtccctaccctccaggaacttacaactcattgttgggagaccaagacacatcccctaaaaacagatatgtaacacctcaagtctgtgaagtacttactatttaaatgatgcccagagcctctgaatcccctagaagtacagaggagggggagatcattaatggtgtggagaagttggaggaggtgagacgatgccaggtgataaagtagacagagaagatgaaggtcttttttttgagacagggtctcaccctgttgcccaggctggagtgcagtggcatgatcggcccactgcaacctccacctcctaggttcaagcaattctcgtgcctcgacttcctgacatagctgggactacaggcgcacaccgccacacccggctaatttttgtatttttagtagagacagggtttcaccatgtgggccatgctggtctcgaactcctgacctcaagcaatccacccacctcagcctcccaaagttccgggattacagatgtgagccactgtgccctggcctgaagaaggtctttatgggtacggcatgactgctggagagttttgtcaccgctgcttaaggaagagcttcccaatgttggatatgtctgtaacttcataatttttttttaattttgcgcttttgtgaatttcctcaattggctttcttattggcccccaggatcacacagaacacttcaaactcctcttacgtgttcttgatttcatcatttagctgaagatgcaggccctgtctttctttctgagttttccttagcaccctccttttaaattacctttttcattggttaaatgccatgaaacttcatcaattctagttttagctatcacttgacccaaagacaagagagttgaatcctggaccttaaagaaaaagaaaaaaggaaaaaaagcttgtgggaaccttatttacctcaactggggaaattttttgctcttgcgcaaaggtcaggtcccgtgaaacttgtgaaataggtgtttttatctcttttcttttccaactgatcagatagatatctttccaggaatttggtgtcagaaatcaaattcaatgagtgggaagtttgacaagattcaggatagtcttgccaaatagcacaagagaggaggtaaagttaggtcaggtcaagggggcagcaaaaatgaagtttataacagatatactgtatatttgtcatgggaaagggcttcagtcaatagcaattgatattaataaaacataaaagaaatgacaataaacaatcaggataactttgaaacaacttctttttatgtaggtaacattaaagaaaattaaagaaaaggaatcgctttattttataaaataaatgcactactatttgcaaaaaaaaatttacctaaaaatgctgctactgaacaaacaaaactacccaaaattagagaacaaaagcataaaaattgttaacaaataaaaaaactatatttttgaaaagtcttagatgatacacaaaaaatgcagatttgtataaatacaccatcgccctgggatgacctcttatcattgtctaagcaagttgtagtgccacggtgtgtttcagactatgctatagaaaatctttagcactcaccttaaaagtttaaagtagaaagaacaacctttaacaggatcatagaaaatgttccatcagatcaaaacaaacaagcaaacaaactgaagcaggtcatttttctctttttggcactgtgcaggaccatatgcttccagagatgggaatttaaaaatagcctgtcacacagctcacattgtaatgctgggacatgatgcgggtgggaaagattgcctcacacttaataatagtgacacttcacatttacaccaacctctttgcagagtaaccaagagtatttctcagttctttttttcctttaaaaataatatgatcttcttgataccctgtaagtggaacaggagggagtacaattcttcccaccttacagagaaggcgattgaggcctccaaaggtaaagtgactcactcaggattacagagttacccagggatcagcactgtgctgttcaaaatacaccaggctgccaactgcagcaatatcctgggcctgtgagaaccgtgggttcataggatgttgcacaaaaaagagagaaatttgcttcccattgcctctgttttgaaatgtactgcctttcatcttgagcatttcataagtttctaattttaaggcaaattgcttataagccatggtgacctatattagctgacatttgaaatcaatctcacaccagtaaatgccttagatttgcatttggtacccccttgccgagtcataataacaatgtaatttctcacatctccataattctttacacttgaaaatggttgtacattcaccatctcatcagatctgtataagcagctataatttaagccaggccagagttatgatgagagggaacagaggctcaggatatgaaaaaaactttctcatttggtaaaagccacagaaactgatgaaacccaggtcttctctctgcatgtgtagggtattttcctgccagccacacagccttttaggtctaaataaagtgttgagactccactgcaagtgtgtgtgcgctcaggagtgactcttctacccagtttggtgcccagcactcagttcctaattggctgcaaaaccctgaagggggattctagatgtggcgggcaccaggtgaagtcagtagtgagcttcctttttggagggaaggaaaattcttggcataccgatgggtccaggcagacactttggatatgtgtggagcccagtgatgttgtgttactgggtagccttaaaccttattccaaccttgactccttctactctgtgccataaactctctccttccaataccccccattcctctgctgccttcccctttatcgtacctggcaaaactgcaatcctggtgaaatgtatatcctctaattcctcctttgcttgcatccaaacagtggaatgttgttaagaacattgtaaaccatgctgatcagttcactttaaatttgtgatcacaaacctgaaacggaccgtgccagaggatcctatgatacatttagcaaattcactttttggtttctgggtcaactctttcaaacctttagctccctacttgaatatccactatgctctacacatcccatgccctgggattatgaccttcctttttgctatcagaggagagttattgcatttttccttaacccacctgcatctgtgcccacatacactacctccctcttattatagtggaggaagtggcatagtttctaaggccaacccttccatttgtcctctgtatcccatctcctttcctatgcttctctcttgcaacatcaaattctgatgttcctttacatctaacccatcagcatacaaatatgcctttataacaactactaaaaataaaaaaaaacccagctctcccttggccctacatgtccctttaactaccaccccctttctttaatgccttcacaaaaagacctttaaaagtaagatctacatttcctgtctccacttctttagctccctttctctcctcaactctgctctaattttcttcagactctatatcactccacttaaacagcctttatcagagtcaccaatgacctacatatttccaaggtcgaagtgtattcagctaactgaactattgagctgaattggacatggtcaatccttcatacttctttaaacactttcttctctaggctttgtgatcccacactcacctggtttgtccttacctttctgtctccttgtctggctgtttctcctcgacatcagattttggcgtgctctggggttcttatctctattctgtctgtactcttcttggatgaactcattgagtcccctggctttaaaataccatttatacgcagaaaacttcaaatctctatctctaactgacttctcccttgagcttcagactccataactctacttgtatatgtaaaaagcacttcacacaaactgtgacccaaaccaaactattgatttagtctttctctaccccgaattccttcccctcaagtcttccctatcacagtaagtgctacctggcctcctagctattcgttcaacgcaaataattgagtcattctaatattctttatttccctgaaaccctatgtgtaatctctcagcaagtcctattgactttacgtctaaaatatatgtcaaattagactatttctcaccatctgcactgctgactatcttattccaagctattatcatgtttttcctgcccacactttttccctctacagtcagctcttcatgcagtagccagactgatctttctaaagccataaattataagtttatctctttgctaaaccctcttaccatgagctataaaaccctacatgatctggtcccaactgcctgttcagcatcatctccctccactctcagcctcatccatgaagttcactggcctttttctccctcaaacttgctcaatactttcagatatgaagaacgttcacttacttttccttctgtttggatgttcttcttctggatctacaatggctgcatcatcttgtcattcaggcctcagttctaatgtcatttctgtagagcaagttcacttgactgatgtaactaaggtatctctctttagaaccaggtaagtatcctaacctctcaccagagaagtgttttcattatgttgaattttagtgaattataaattgaaattgtctcttgtggtttctgaagacattatttgctctgtcacttggtggccttttctataaaaccccatatgaggaattcttttaggtctaagtgctagaaaagctttgcttcccttgaggaattgatgatgacacaactgattttgctttgttttatttggctttgccaacacgaagctcagagccaaaattttggctgctttattgcaaatgtgtaagaatatatgacttggttgtctgtctagacagcagtgtctaatagatctttctgcaatcacggcaatattctgtatctgaaatgtccaataagtagccactggacacatgtggtgactaagcacttaaaatgtggcttgtgaacctgaggagctacattttaactatatttaattttaattaatttaaatataaatagatacatgtgccttgtggctgccacattggaaagcacaatcctatatatcctatggtttattgataagatattgtagtttatttttatgtactcttcattattcattattgtatttcctataaattacctcaaacctttgtggctggaggtagaaaaaaaaaagaaaggaacaaagcacaattaaatgaacaattgactttgcagggcatgtcagcacgttcatagggttgaaggaagtggcaagtatacagcaacagtggatcttaaatcctatttctccttgtgagatctatggaatgggcaccagcatcaagttggagattcaagttctagttcttgttttactgttggacatgtgtggctctgagtcaaccagaggtttagtatgttcatatgtgaaatgggacttctgtattggtgacctgaagcctttggcatctgagatgctgatgtacaaccgctgtacccatttctgtgccttccaaagccaagcaggccagcccttggctacctacctaaaataggaggcaatactttgagaaatcatctcattcaagcccatgcttcaagacagagtcaccggtaaactaatttaaaacaaataggaagagtcttaccttccaaatgtcttctggtggaaaataattcatcctacatacttagtaatttggatgtttttaatacagaatgaagtatcataccccttagtatataaaggcacaggactgaaatcagaagacttaggttctagtcccagttcagctactaactatctgtgtgactttgatcaagtcaaagtttcttctttgtttaaatgagaagattggaccaaatgatctttaatttcctgtttagcattagccataaccatagctaatatttattaagtagttggaatgtactgaaatgcattaccttattttgtcctatggccactgagaatattattattcccattttaaagatagaagaaactgagctttagtgtttcccaaagacatagagttggtaaatggtagagtctttatctgaacccccgtggtctggattcgggacccactttcttacctgctttgtcttctctagaattttgtgatttttataggccagaacactcttgttattctgattagacaaagagttgacttaatcctttaaactgaactttcccaaatctgggtttcaaatgggcccaaatagtgtctcttcagtctttggagtggccaggaagagctcagcacagccacaattaatgagttggttgctaccgggcaagagtggccttgttctttcacccagtttgctgtacaaataataccatgttctaggtatgctgtatataaaaaaacattgggaagcatgtgaatttagatgtatgtcatgacaagggtttagcttggacttttcacaagtcatatcatacacatttcacaagatcctatcacaaagagaaggtttatcccacaaatctcaggcatcacttcttgaacatggagcacctcaatcattcctgtgtctccaacttgttgatttcagaagctgatcctaagctcatcttcaattgtaaatgattttgctaattgttagaaaagcacattgttagaatagctaattgttaaaacagttggttagaatccatgggagcttcagcaattttgagttcaatcccaagagggaagaggattttcttaaggtcaatgtcagagtttggactaaatccccggtctctttcatgcccaagaaagggccctttttcccttttctgactagtagtcaggtttacttccttgggagatggaacaaatgaaacataactgaaatttcatcttgcctctgcagatgtcaggagcaagggagcaccagtggtagaagaacctgcctcccctggctccatcaaaggccacaggcccatgagaatcacccggcctgctctgagcagcacactcggaggccacagccacgcacaggaaagtgagaggaagtggaaacgtgcgagcagagggctcaaagcgacgggctcaccaccggaaaaaaaaaataaaaataaacacgctcagaaatagtgtaactgatatgcaaagaagatcaaaacaagggttttaaaatatcttggctgctttagaggagatgggggtggtaattaaagcgaggttgcaaatgcgtgttaggggagtggggcggttaggtggatggttcactgaagcctgccaggacatgggagcctgggagcccaagggtatttcagatgaaaatgtggcacttatatgtggaatgtaaaagaaagttgaactcatagaagcagagaataaaatggttattctcagaggctgccaggtggtgggactggggagatgttggtcaaaggacacattttaataaattcaagagattcattgcccatcacggtgactatagttaacatcaatacattttatattgatataaatatatatatatatatttaattattttgttgggctttttgtttaagttccagggcacatgtgcaggatgcgcaggtttgttacataagtaaatgtgtgccatggtggtttgctgcacctatcaactcctcatgtaggtatgaagcccagcatgtattaactctttgaaaactgctaacagagtagattttaagtgttcttgccacaaaaaaataaggcgctacatatgctaattagcttgatttagccattccatagtatagatatatatcaaaacatcatcttgtacaccatacatatatataattttggtgaattaaataacaaataaagaaagaaaatatgagaggaataaattcccatgggtaactcagaggcagatatggacttgagagcaagaagcccagagtccctcaaccccaaactctgccctccccagcccttttactgttccctgagattctgctccatttagagtcctgtacatttgtcccagggcagggctcagacaggccagcagtggaggcaccaggaagtccacccaacttggctgaacttcaaggctcaagttccagtttggaacaaatgttctagggttaatggctggggctgagcaaactcaggaaagacaatctccccagtcttgcaaagtgaaattctcttttctttcagtgtgttgtgaagaactacagaaatgtgttctcattaaaaaaaaaaagaaaaaaaaagattttattttgaaactggttcctgaaatgggaaaccaaaaggttagtgatggctgtgctggccgtttttagcctccctccaccagtttaaccatccctaataatagtccaagaatcacaagacatttccagcaccagaaggtcatcagtcaacagcataggtgcaaaagggagcgtttgctcttctacagatcccaatggtctcatgtattttaacagatgaaatgctctgaaggtggggttgggggcggcctggcctttggaaattagtcaccactcacatagttcttgcatttacacttacaaagcactttcacagctattatccagtgagatgggctgggcagagaaaattacccacattttccagaaatctgagactccaagtgaaatggctcaaggtcatcgctgttaaacccaaagcactgggtgtgttctttccggggccttgaagaaccacagatgggaatcagttacctttgctctaaacttgagccatccctctagatgtcttcctttttcttcccacccttcctcctccttctatgataaagtagggtacaattagtattttgatgatgaaatagaaattttatacctttgatccaatatttttttcttctgtttctcttatttgtctaaccatgagaaggcaagccctaccctaaactatttttgaacctgatatttagtaaataaccaccagcagatgcatgtgagttgaggtgggagacccttttctgagctgaggtgggagatgacaggtaaaggctagccttaacttctgcctgatgcacatttgctctctaggcctagagagtattatggtttacacaagctatggaatttaagaagagagagctcactgtgtgctgggagcatccagagatattctagcaatgggtgccattattgaagaagcaccttgaagatggatctgtggggtggtgtggggaagcaacatgataaggtccaggccaagtgtagtggctcatgcctgtaatcccagcactttgagaggccgaggcaggtggatcacgaggtcaagagtttgagaccagcctggccaatatggtgaaaccccatctctactaaaaatacaaaaattagctgggcgtggtggtgcgtgcctcagtcccagctacttgggaggctgaggcagaagaatcgcttgaacccgggaggtggaggttgcagtgagccgagatcatgccactgcactccaacctgagtgacagagcgagactccatctcaaaaaacaaaaagcaaaaaacaaacaaacaaaaaagttaaggtccagaggtttaaaaagtgcattagacattgtgggaaattcacatagcttcaccatgctgacatggtggaaataatgttagggagatattatggagtcatactgtggagggccttaaaagacaagcagagtcattggaattttatcctatgggcatttaggagttgctgaaagtttgtgaatgggagagcaggcgaagaagaatggtattctagaaaactctttttagctgggtatgcaagatggaaaataacgggagtagctggcagaagaaagattataaggaacactgaacgtggagtcaagaggctgactataatttctaaccttgattaggttagtcccagatataagcataaacatatatgattatctcctctctaatatgcaaacctgtgtggcctacccttcaggaggtcctgaacatcccctgaattgagggaggttagagtgctttgtaaactctgaaactacagaacaaacatgggagatagtgatgcagcctggcagatgcattgaaaacatgggcaggttggtgccttggggatgggtggttggagggaaggttgagtgaatgccagctctccatttaggaagtatctttcctctggaggagtatcccctttccttcctggaaacttctgtgtcacctggcacagactgggggctagtggaagatggaggcatgtcaagctggtagtcaagagtcaaagacaagaaatccctgaggtctctagtaacttcctcaaggggaataaaaaaaaaaaaatgacaaagctagccctttaaccccaagcttgaaatcaaaataaacagttgggttactgttttgcagagttgctgagtaattgtaaagggcaaagaagagtcagttttcacaagaagattgctcaatggaaaggttttgccagtggaggtgtctgggaaggtacaagcagaagccggcttagttattgtaaggagctgctcattggaagacaagccttggcctcatggagaaaaagggttaacatgaaacagtgggaagcaaactgctgaactgggactaggttaggagggttaagagagaagcatctgggctttcagccacccttgggcttctagtggaagcatttcacaatctcctttcttcacgggttatgtccttaaattgaacagccagtgggggcatcttggggtagtggaaagtgtgttgcaggcctggcttcagcactgcctggtggtgtgacccttcctctctgggccagggttagactagatgggatgatccctggggctcctttcagatctagacccctaggaggtgtggggcaggcgcagcctgttttatcagatttaaattcagaaaggacagctactgtaaatgaccaggctttagtgctggcagtgacagctacataaggaatttcaaataaggtcatcttaaagcaaaagcaactgcgtgcttgctgaccaaggcttgtggatcagatgaatcagaaagctgggacccttctgagttcatgcttaccaatctgtggggttcagtgtaactagatgatactttccctaatcaacatcatgtatggggcagcaagttccctttgaactttagagaacataagccacagatgatttccctcccacttccattttcccttctcaagtcttagaaaataagatctcttcccttcccctttcccccatttcccaagcaggttctcagtgataaatgtgccactttctctcttgcactcacttgcccttgtcctttctggtgaaaagaactttaccggtccaggctttgggaagtagggtgtcggggcatgaagacaaagttcacaaagctcgaccagctggttcctctggtggcccagactgggctgggttgtgttgtgtgtccacacaggcagagaggtaccacagtgaggtactcttttatttctgaagggaaaccctattcttccagaacagttcacaatcaccattgacattttctggccctgcctgcagaatccagagaaacatccacatgaaataaagctttaccaagtgccaggattcagttttagatgaggcaaatgacccacaggcagataaagaaggagacaggataagtggagaagtcactgtgataccctgtagcatatggggatggccctacaagtatagggtgacttcaaaagaaggaggaatcacactcagattgaagatcagagaaggcttcatggaagagatgacatgagctagaccaattatcaatgacaattatcaatgtcattattattttgatgattatgattaaagctaacttttgttgttctctcactatgtttgaggtactgtgctatgcccttgtatattatctcagttcctcttcatggaaatcctcccctgttagatagcatcattttgtagatgaggaaattgaggctcagaggtgataaattgcttttccaaggccacccagagagtaaatgattagagcctgtgatttccatagaggtatggatgtgagatattcttagtggagggtaagaatgactgattagagtgggtacatcataattttgattgggtagggaatctgtgggagttaaagccagtgggacttgaagaccagtgagaagttcaactttgtctgcagactgcaaggagcctggcagcttttgaggaggacagtgacataatgagaagatggcttttgagatgctaatttagcctggagtgcaaatggactccagggaggactgacggcgaggggatggactcagaactggagtccaatcttctgagaggtgatgaggggttgagctaatggtgccaggcaggaaggagagttagagaagcaaccttagtctgagcagttgtccgtccatgcccttgcttccagcaccaaaggcacagcaagtagaaaagaaagtaaataaagacagtctgcatgctggtgaggttccacaggtttctcgggagcttgcctgtcactcatgtctgatgtcaggtgctggtaaggtggctgccagtctttcctcaccttcaggtgcagggcaatgcaccctctgaattagaccactttaccagtccaatttgtatgttttctccatcactcttgtctccccactcccaaaaccccaaagaagtggaatcaaatgaatcagagttgttttctttttgtttttcaagtggaatcaaggtctgaaggagaatacctgggcggaaccaaagatgggatgctctgaatcattagtcaccttcagggcatcaaacaagaggtgaatcagagagacagggagaagggcaagaagtaatgagctcctggcgcacttgtgaatttcagaggccccatgtagaccgctagtgggcagatgctctgcttccaagctcctgaggttcctcctgcaatgaatgtggctaaggccaaggaaacactaaaaattgcagtggtttttgactcagccaggagagtttagtcacgtgtagttgtactcttccttggtgcttccaaagggctgctttgacatctcagagagcagtacagagtggcatttccaggcctgccatcaccaggacagtgaaagaaaggggtcctaaggactatttaatccaatatgtgaatacctagagtaggcatgtaactgagactcagtctcccgccttcttattttattgattttacaaacatatagtgctcgttatgtgccaggcatgttctatgcactttataagttatgaattcgtttaattctcataataatcctataaggcaagtgcctttgccctatttacagatggggaaattgaggcacatagacataaagtaacttggcctaggccttacagtactaggttgtgaggcctaccaagatgtgaatccaagcagtttggttacaaaatccaaaccctcaacacttacgctctgttactctttgttctcatttctactctaagactggcatccctacaaaaaagggagactagatcaattcatttctaaaggtgaaccattttagaatctgtaacacattgtcattcattggaatcagtaagtgttaggacttaggctgtgcaattatcaagggctgttaaatatgctttggtggacacaaataccggtatctgttaattcctagcattggcttgccaccaccctgatggtgatttgggtgagtcttctgacccattacagggccccaggcctttactatagattctacattagtttgcaaccctctagccaactgggttgtaaaaatagtgcttaatctaagcaaagaaaactgagatggggaagtaactataaagatttgggctgcagaggtagagtgattcagcaagataaggatgagaggaaacacttggccccaagtgttgaccacgtggtggaccaaaaacttcagtttccttagcaaggagggtgaggcagataattagtcagtagaaatggggttacttgagtggaagaaatataacctttctagtagtccaaatgagaaaggttctgtatggtaatacaatctccaatttccttgttagtttaaacattcagtgggataaggctgttcacattgtagttttcctggtaggaaggtagcaggtatagtggaaagaacactggactagtactggggcatctgagttcaaactttggatctgcttctaactaggtgagtggcattggatgagccatatctctttttggattcagtttagctacaatgacagtgacctttcattgagtaattgccagtccagtctttgccctcaaacttgacatatattgccttatctaatgctcatagcagttctgtaggcactatgattactgttgtgacccagatgaagaaaatagagctcagacagtatgaaagagaagttcagtcactacccaaggtaacacagtaagcaatggagctgggaatttttcctaggaagtctacctacctcccatgctcataaatacagtactgaactgcccttgtcttcatagagagaaggttggacactggatgtactatgcacaatgggttttttcagtcccaacattctgtacttctcttctatttaggatatttgcgcccttccaggaagagcaagtggctttgctcagcactgggctttggattgagccaatgctttgctcatgtgattgttgcagtgaaatttggcaggttccatcaacctcctctgcatagtcagctctgtgagggtagggctgccttatcttccctatgaccctcttgggaagatcaaacaaggcaatgcgggagaaagcacttggtaaatgctgaaggattaggtgttactgttgttgtttttatcatacgcggcattcagacaaaattctcatggtattcctagttaaaggcactacaggtcctcagtgaatatttgttgagtgaatgtatggacgatagatggaagccggtggagtagaggagccactgaagtgatgagagatacaagagaagcagaacagaatgagatcagtggagtgtgaccagtgccctgatctagacagtttgaaagctggagatcttcaccaagagtcaagattctgacttttgatttaaaagctgcaatgtggcatatgatcttcttgtaacaaatgagacacattctagtctcttcattgaggagtccacatatggaagtaggtgccaaaggctgaaccatagaatctggctgttaaagatgagctttgaaagcccaataccactaactttcagggaggctccaggaagcccattagcctttctggcctggggtttcctcctctatccaactggggtttggaccaagcccccaacctgttatgtctccatctgaaatttcattcgtacatgcagatcttacaagtcctgtctttcctgccacctgctgacaatcaaaactcacctgcctcatgtcccatattcccagaatctcattctcagccaagtaatatttatcactagctattctgatgacctcacctgctgtgtgctctcaggttttcatgtcctttgctctggtaaaatagtcatattttaccatgtccttgaagacatagctaatgacgataattttcgtccctgggataggtttgtaggggaaggattgttattgttaatgacaatgatagcaaccaccattacaattgacaaaacactgcttcatcctttatgtcatttgatccttacatgggtaggtcttgtcactttcatgggcaggaaggaggggcagcatgggactgtgaaagcggggagactggtgccccagctctgtccccatctgtgaacctttctctcacattcttctttttatatgagagtagttggtctgatgattctagggcttttctggatttaacctttttcaaatctaggtattattcttatgaagagcaaatgagacttaggtggtcctggctgtttgggatccatgctattcttatgtggcctccctctgtggaattcttatgtggcatttccagtgtgtgaagttccagcctgtcgtgagatgggtggcccagggattgttattatactcatttcacagataaggactcagagattcagagagattaaatgaattatccagagtcacaacctggaattgggcagaatggtggaactgacatctaaacccaggccacaggatggccaatcctgcttgtggggttagtagagtctcttgggagccgtgatctggtttttcttggactcccctggggcccatggccagattggctcccagagagctaactgcaggtgggctttgaaataattccactttgagagaacaaggcgaatccccaccttgcaaatcccagcccctctgactctgtgccgtctcctccctcctgagtcctaggctatcacagtgagcacagctacacactgagtgtttcctgtttgaccctacaaatctatttttcatccttgtcttgcagccactccaggaggctggcctttatggatatctttaggttccctattcctttgacttctggttggaatcagcccagcactgatcaggtggttggaaggcgggagaggggagaggtgagcctactttgtccccagcaccctcactgacagtggcaggttggcaatgccaaaggccacagccctctcctgcagcttaccaggactttccagactctggtaactgcctctttctttgctctttcaggccaagagcaggtaacagcccccagttgttgtgagccttagggcacattgctatctcttggttttccttaaccctgcctgtatctttgcaaattatcatgaatctctttttgcccaccttctttaagcaagtcctctgcttccttccaggacctgtgactgacacaagctgcctcattcttccttgtttcgaatctcccatttcttaaaggcatttatgcagatattgaatcttgtaatatttaacaaaacaaagtaaaaccaagctaggggagaagcaaaaaggtaggattgtatagggtatggtaagagcactgagcttggatggaggggctgaaggcccaagtttaccacttactagccgtgttatcttgccagctcacctggtcctgctattaaatagaaataagaacaatttttgccttgtcttccccatgaccctctggaagatcaaatgaggcaatgtgggagaaagcactcggtaaatgctgaagcattttctgagcattaggtgttactgtttttgtttttatcatacatggcattgagacaaaatcctcaaaaggccatgcactgtaatttccaagacactcagatttccctgtcacctccatgcctcctggatcaggagacctggcatttgtggaatccaagattaacgtccagggagagttggccaagcatgggcccacatggcatagctaaaaatacttttgacctcagtgggagcatctcagtccccaaaagggggtggacctgagggatagagggtgtgagagggaaatgacctccattagctggggttaggagagggcagggcgagggtggttgtcacccttctttttaagtgccaaggggaacactgggttgatctctctctctctctctcttttcctgtgtgttgcagtggtagttggggatggagataaagattgatctgaacattttgtacttttccgttagggtaaagcccacaccttaaagctctttctcacggccaagcctcttaggaattttcccagactgccattggagatgatagacacctagagccagaaggaggcaatcctaggatcttgatttacagttgattatagaagctgacttcagtctaggcagaatctaatccaggaaacttggcttaatatccccagggatggggagcgagaaggctcattgtctgtataacctaaagatcagtggtttccaaactgtaattcttagagctctagacccttgcttcttaaagtttggtccatggatcagtggcattgacataaactggaaagttattagaaatgcagaatttcaggtcccaccattgacctctaaatcggaacctgcgttttaaccatacccactatggatttgtgtacacatcaaagtttgagaaacactgttttagaatccctttggggtacctgagagagtcaccagtgggtgaactcaagttgtatatggtagggtcccataagagacaatatttgtgaagggagtgctgttcgcattttttttttcaaagattaaaaagttgaaaccaatgtggtcctttccttcctttgttaaaaaacgaaattgtgtggatgttaggaccctgctcccggtgtctccttctgggccacgcccctgactgccctgccttgcacattacctccttggatgcctgagtgctttgtgcccaacacaagcttggcacaaggatgaggcggctccagaagtgaagggctgtcttaggagactaacgagacattagattgtttcctaggccatgccattcccgcctccaaaggtctagccttgagagtgctacctggtgaggcaatgatgacacaaaatgggaacttgtcacgacctgggagtttagaactcagcttggttttctaaagggggagggcagaagggtgcagagcttcctcctctgtaggtggaactatgcagggagattagtgtttgttttgtgaggaacatcctggcaggatcggaagaagcaccgggaactgagaagagataagcctgcttccagctggcatctgggcacagccctgcagtagcaggctttcaggatttccagagggagtgcttggcggcctgcagcaacgtcttctcagcatctcagtttgctgccattataaataactgtgatttgcattcccttcacatcgtattctggaggagttcaaagcattgtgctaccaatttcccctggcccaccctcacacaggtcccttagaggcaacattcatgtcttccattttacagaaggggaaactgaggctctaagaagtcatgcaaaggtaccacctatgtctgcgcacatctaggactggcaaactctgggaagaagcaagcaccttagcacagcctcagagcccccaagacatcagccccagactatttctggcctgaactccagcttctcttcctccttcaacctaccctctgcccagacaactcagccctgcctgcctccctaaactcactagaccctctagttacgcagacacattcccttctcccctctcctatctctatatctcacatacacgttttcacctctcttgtgacacaattgtcctctcctgattggagctgtctgacaacatgctccctggacaactaccagacttcaaaaccctgcaggcaggggtatggttcagcccttcagctcacagcacaatgctgtcctccaaaaatgcttgtgcaatgatgaattcatcagaagacagaaacatacaaactagtggatgaaacagagggagtctgtatttatagaatctcatgggtaaaacagtcatgtcgttcaacagttctgatactatggaagagctcattctaaaagcatttgaagtagaggctgttgtttcctattaaaataaaaacgcttgctgtactttggggaggtcttgagagacaccacctggcactggcctgtgactgaagacacttgagttctatgagtctcagggtgtgtgtatgtgtgtgtgtgtgtgtttaactgagagtactgagatgatttactaccagggttgtcatgaagatgaaacaaggtaaggtacttatacatgtttgttgcaggattgccactcgctatgcctttgatacttaacagctactagctagtcagaggaatcatccgtttttctcctatcacagagcccaaataattcatggggatagaggagaaaagggcaataggaaacttgaaactgagtcttccttttcaggacatgaatgctctggatcttaggaaatggttatccaggattctaaacctaatgatttaaagaaatggtgtctgatatccagccccatgctaagctcttccttagtttcagttgtgtgacttactcaccagtaattcaggaattgagcacgcctggactctgggcctgcggtctccatcctagagaccttcacactgggcaaccagaggtgtggggtggagaaaggactggcctggcatccgtgggaccagggtttgtcctctgaatcatctcttgaccatggaacattcatttcccctctttgggctttagcttccttgtcaaatgagaacctggactagctgctccataagaccaatcaccatagttctgttatgcaaaattgagatgttcacagtctctgctccccggcatctgcattcttcttccttcttgtcatgtctacccatcctaatgactagggtcagttgagtgagaaaaagcctgtaatatagtgctttacatgtttaaagtgctttcatactcacttaccttattctacctttacaaacaggtcaacaggacacacaggtggatgtcataatccccattttatagaatataagaatgagtcttagagatggggaggggtgctcagtagaggcagagcagcacctttgcattccctgttctgattttttctgccagtgactcccaggactggtggcggttatagtgctggatttggttccctggaccaaaacaaagccccttctgcttcctcatgatctttctcccactgcccattctcccactgcccaggtcccagtcaccttagtccttcttgcttggcctcccaataagagtaggatgtggtggagctgagtccggggcagagccacttggtgaagtttgacaggggttggttttacccttctgccacttcctccttcatcctgtgctaaagtatttcttcaggtttcgccttttgaccaagcctccacacgagggtctgggaaacttagagctattgttctgtgggtatgcagaggcagaatactgagaacagagacagtgcacgggggcaacctaggccaagtgtgacagtgagacttctgagatgcatgcttgacttgctctgatgggttgaaaacaagtaattgggcagaaagtcatgcacctggaagataaaatgataagcttctaaagtgggggcagggagaggtagcacaatgcttgcaatgaaaacaggtgtatgcattattaagcagaattagtcaaggtgagttggaagaatttaggcatctctgttgaaacatttttcacacccatcctacttttcttaactaccaccgccctctcacttctcattcaggaggttgcaaaagcctcccaactggtctccctgtgccagtcctttccggctcctttccaccccgcaacatggatctcaacctacctgttcagctgtattcctcagtgctcccgtctgagcatgcagtgctgcaacccaggcaaacgactcactcttctcgtcctgtacttttccatctccagcctttgctagtgtgtttctccctctgcttaattctcctaccctgcaagtagaaatccaacctcactctttcaggcccacttcaaatgccacctcccctgtgaagtctttcctaatcctaccctcttctttccttcccagaggaatgacccctcccccctcaggagtgtatagaacactcgattacttggcctgccctttaagggttcctattgccatctacctggtattttaactatttctgtgcatgtcctatctcccctaccagacggggatcaccttgcagtcaggaaagggatcactttcgaatttgcatccctcaaagtcttggctgctgtttagttatctgaagaattaataaagacatgaatgaagagtacttgttgggacaggaaagagaaaagctctagcatcttagcttaaaactcaaattaaactggtgatgcaatttgagacacgtgttgagtgaaacgcaaataaatatgttcaaagaaagctggatcagaaagaaaagagcctggcaagggagtgcaacccaggggaccaagaaaataggtatgagggagagggagacagtaatgtttgttttatgcttggtaacaggagaagtcaacagaagctggaagaagcattttagggtgggactgaatgaatcacagagcttctatttaacccttatatagccccatatgtcttccccagtgtagaagccgtaggaaagaaaagtgtctgcagtattagtcggcatcaagagttatgattacctttagtcaggccagtgaataattttaacatgggcacggtatgatccatgccactgaatgttcacagcctacttggaaaagacgacatggttccaagcaaccatgacaaagtatatattcaaatgtgccttcagaatgtatagaacacttgctatgggacagtggaagagcccaccagtaattccaaataggagaaggtggaagcaagcacgatgagggagactttatggaaaacatgatttagaagcagaggcttcaagaatgggcccaactttcaccagtctccgggagtggtccgtgagaaggagtcacagtacaattcaagctagaaaggttgccgaggaaggcaagcctgatgggcagggacagaagggactataatgcccagttgggcagcaatgccagctcaccttttggaacacttgtgggtattgaccgacctgtgtttatgcactagaatgagaaagctcacactgttttgtgtgtgtggtgagtaggaaaggtaagcaaaactagaaattacaaaaagcctactgaacaatggaaagcaattctccctcatctgaactcagttccacctgtgcaggcggagtgcagacggtgagtccctaaggcaggccagtgttggaaagggaggcttatcttggtcattcattgtcccttggcttagggaaagtgaaggctaaaagtaatgtgaggaatgagggacttttcactttcagcagatcttgtatatttattgcctcatctgcataggtaaatcagagtggtcagcagtgcagggtgaggcagcggttagctgtgcagctgcatgaggaggctccagcagcggcagggcggggagtccccaaagccgcttttgggacccagtgcctgcgccgtctagagctaggtggaagagaagcgggaaggacagaggaaagggaaagagaggctgtggcagagaggaaagggctcctaggtgtcatttaggacaatccctctattttacacttgggaaagctgaagtcaagaggtccttgtccacagttacagggtcctcaagaattagtgtacgtcctatccctttgcacaactgtggtggaggagagggatgggaaaggtagacaactaaaagtgaagagtccatgggtcctccacaagatatgctggcacgccctcctaacccgctgttccctgacggtcagcttctgtctcttacttacttacgtttcaaatcagtgttctccagggccacaggacctttgggggaaatatgttttccatcagaaagacattcctgatatccatgaaatttgcaagctttctttgtagttattgttgtttatttttgttttccagttgaatggaatccttttaaatctctttaatattgcttatgtgggaaaatcattcacggtcacttatgatttctgaaggctttggatggctaaaaaactgatgagcattaagaaatgtatgcttgctccacaaattttactttacatttttgaaaggattaaactggattttattttcggtttttaaggtggttaagctgagaggcagctatgctctgttgggaagagcactgaccttgacctcagaaaacctgtgctcaaatgctagctctgctattattgtttgtttgttttactttggtcaagtccattgatctctctgagcgttaatttcctaatctttaaaatgggggtattaacctctccctcattaatttgcttatttaaatttatttaacagatagttaatgagcttctattaagtgtcaggtgatgttcttgagactgagataaaattataaacaagacagctgaaatccctgctttcccagagcttttaatagagattaaaggggataagatgtattgaagagtttagcacggtacctagcatggagtagctgcttaatacattctaacaggggaactcttggaacactgagtcccgagacagctgtttcagtcttagctgtgacattgactagctggaatctctagacacataaatactttccagtacttcccctgggctagtgtggccttcttccacataaatgctggggatcattattcatatagggtttccacagacagagaactactttgctcaggtgagtcccatttatgtagggagaagaccagagtcactggccctaaacatgtctatggaagggtcctgtcccacgcatgggtcaattttaagatctggaacgaaatttcagtctgtttgtttattgcttgctttctccttatcaacccttctctggctactagtaagcagcttagctcaaaacaaatgaaaatctgatgaaatctgctctatccctagatgaacttgctttcacaggaaatggaggtgggacagttagtgaccagtaatcatggtcactaaaactgacacccaactgggttggtccatcttaagggattggtacaactcttttccaatgatggtatattaaaggggatttcaaaatgaagtgggtttggatctcagaaccaccactggttaactgagtccaagtcagtgactgagggagaataaacactattttgctcaacccttttatcttacagttaagggaattgtggtccagaaatgtgaggtccctgccctggaagagccatctgctaattagtggcagatacagtgacatgaattttcatagaaatagtcacaggacccaattagaaggtaagtctcctgattccccctccaatgcttattcctttggtcctttccaagttggaagtgccacataatactcttcttttagaatttgaatatccccctaaacaatttctgagtaaatttgatttctgttcatgacattgacttcaacaaccacaattaacagctgaatttaaatacctgcagggatgtaaaaatgaagcattgggatttattaagcggaatctcaaatacagaaataaagtcaaaacgaatataataaatggaggtaggttttgtttaaacctaaaataacttttttttagacagggactttctatgatgtccaggcaggagtgcagttgttattcccaggcacaatgatagcgctacagcctagaatcccctgggttccaaggatcctcttgcctcagccactcaagtagctgggactacaggtgtgtgccacagcacccagcttagaaagaactttttgacatgcagagctgtcaaggctggaatgttctgccttggaaaacagtgagctcttggccactggaggtgaccaagtagatgccagatattcatgaggtagtaggttgggctgggtgatgtttaaggtcccccatatctttaatatacccatgtggattttatgaggccctggtatttaaataatccctttttgaacccatttatgcatctgtactaccagctagtccctacctctcttgcttattaaatttactatctactatgtaaagtagtactttcttttatttgctctaaaattaactcttgcaaactttggggtaaggggaggttgggatagttctgtttttctgagatttgctgattaagtgcatagttccattctatcatgtattgttatatcccttctcagtctgctcattttttgattgagaaaaatctaattttgttaaatctatatttataccaacaagcctccgtcatattggtgatttgaatagttcttctctgtccttctcccacctccccagctctactaaatttttcttgaaggtccatgaatagaactgccacattttttccgagcccacacactgctttcatgtgaatatgggataatgccttttctatctggcttccatacactttctgatgaaacccagcattcctctgagcatctcagcttatgcagccactggagctcaattttctcagagctaatcacaattcctactctgtcgttattagcttgtaacactgtacaagtcactaattttcctgtacaagtcactaataatgaggaaagcaatactataaaaacttaggagactcaaaggaaaaaaaaaaaaagatgatccattcaagtgtcctgtgtgatacctggtacagaagttgtacttaatacatgtttgcgaaagtgaaatgaaatagacttaaatgtgtttcctgagctatgatatgttagagtccatcattttataaatagagattggggtatattttacctaagagaactaccttatatttgccaaaaccgaagctcaattgttacattttttccctcattcttctgagatctttatgtcctgggaggactccagtttgaatcctttctctatgatttattagctctaagatcgtggctcattaacatctctaagtcaatttcctcagctgtagcattgagataatagaaatacttgacctggaaacaagggatttgaacctgaattgcctcagaattcaaaccctagctctatcaatttctagctttgtgaccgtggacaagttgcttaacctttctcaatttcctattatgcaaaaggaaaaaaataacaccctcctcacagagtccttgtcataattcagtgagatacttatgtatagcattgaatatagacagctccagcttacatatagtgggttctcaacaacaattagttgtgttcctcctcatgtcatgggattgtccagatgttctgtaacttccaaagaggtgtgcagactgggtgcagtgactcacacctgtaatcctagccctttgggaggctgaggtgggaggatcacttaagcccagggttcaagactagcctgggcaacatagtgagatccccccaccatctgtacaaaaaaaagatacaaataggtgtgcagatattagcagttattgtgtgttgtaatatttctttacccagaagcaacattgtgtagttgaaagagagtggatttggagtagtccaactgtgagtcaagtgctataaactttgaaaagacattgcttcctgaggcttgggtctcttgtctcaaattaagatgacagacttctttctacttaccttgcaggggtgccttaaacattgataaaatcctgatggtgaaacctttaatgtaatctgaaaatgaggcactatggtgactagaagtgttcagtgccatttgcaaaagtgaatgtttcacgactttgtacttcttccatgtatttcattaaaatatgaagtaagacccaagtcagtgtcttactgactctggatttctgatttctggtgatctttatgttaatatcttctattcaaaggagttgcaatcaaatattactatattgtttccatgatccttgtcaaagatgacatgtactgtaccaaatagttctgcaatcaagctgtttcttgatgtaaaaatctaatcacaatagtcttgaatctctgaaaatttaaatatttgagtttcaatagttccctacttatccctagttctagactcttaaagaacattggtttgttaaaatccttccgttgttttttccataacaagttgtttgttacacttccatgatcccactctttgttatgaattccagacatggcaatgatatttactagcttgtaattcccaggtagctcttcatattagggtggaaatcctattggcaatgtgatgctccctctggtttagtagtaatgacaggctgtgcattctggacgatggctccacagttttatacatgacttattccagaattctggagtgaatgtcatcagtccaggtgatttgtttacttagtttgttcattccatttagtgtgtgtgtggaggggggtggcagtacgcagcatggagccctgacccgataggccagcaatttgaatccttgccccaaatctgcatctaacttggatgaacttgagtaagtcatttccctctgtagctcatcattgccatctgagactcgaaggggttggataaaatgatctctatggttccttccagttttgtcattttgtgattctaaaatgtgctgtcattcatagttcttcctggcaaggtctctggtgggcaaaactagggccagctgtaacagctgacaacatatctttcttttctttttctttctttctttcttttttttttttttttttttttttttgagatggagttttgtgcttgttgcccaggctggagtgcaacagcatgatctcggctcactgcaaactctgcctcccaggttcaagcgattctcctgcttcagcctttctagtagctgcggttacaggaatgtaccaccacgcccggccaagtttgtatatttagtagagacgaggtttctccatgttggtcaggctggtctcgaacttccaacctcaggtgattggccggcctcggcctcccaaagtgctgggattacaggcatgagccaccacacccagcacatctttcttttcttgccagcactcagaagcttcacttcaaataaactgtggggaaagtatacttgatcaagtacagtggactatggaattcagcaactagcatggcaacctagacggacaagagctcgaaagcagtgctgtgaaatcattagtattgactttctatttgtaaaataaattgaaaacatacccatagatgaagtttagagtaaaaataaagagggaggagagattgctttgcttgtttcacagtgctggcattggaactatgtctttattaaggcctcatgcagagggaagggacttgaactaaacagacttctaacttctattttagtggcattctcttgctgatgaccttgtgcttgtttgttttcctctttgggcctttatttcttccacctgttaataagcatcttgggataagacagtgcctctcaaagtgtaatgtccatgtgaatcatctggagatcttgttaaaatgctgattctgattcagcaggtctgaagtagggccttgggatcctcagttctaacacggtctttgcttctccttcagtcattgagaagcagaggctagacagtttttaagtccttttcagctgtgaacactccatgtttcaaataatctcccaacactagagtgagaagcagaataggaaggcctctctggatggaacatcatctatattaaaatgcctttttgttttagacaggaaagaatggaattcctaaacttgggcttaagcaagaggaaaggaaagcactgaaggggacatttactgtgaggtctgaggtggttccaaaaggtattaatgcttggaaggaaggaagaaaaaccaggcagaaagttggcttgaggcaggtatagaagtcagggaaaaacaatccacaaaaaccagtggtggtggtgttggaagtggtcataggaaagtaataaagagttttaatgctaattctccagagatgcgtgattggccttgtgttttgtagatattgtcccacagtccattatggcaatcctacaaagctgcaggggtgcagcaatgctgtctccaccataaggcagaactaagtggagagaaaggagggacaatcatacggagagggaggggagcctcttggaccctacagagccttagctccgacaccccagtaaggggctggagcctgctctgcatctgctgtggctctccctgggtcacccaccggagccgccgtgggcagtggtatgggggaaggaaagtgtctcagcacaacctcagtttcacttcctgcctcaaaacacagagagtcattatataaatatcaacctcagcagctgctgccctcatccctcttctcactattactcccgaagctcagctcacagccaaggcgcctgccaggcctctcactttcccctgatcccacggcacttgcaccaggcccgccaggtgggtgcctggggcagaaatgaatcacaactgctctctggccctccagccagccatacccagcagcccttgcgtcgctgagcaggggaggtcgtcctgactggtagcccacgttaatcaaattaaaccttgttcacagacgtgacaggcagtcagcccatccgtggaggccgcagaatgcaccgtcagcactcattgctgctagaggtggggcaggaaagaacgcagcatgtttatatgtatatatcataaaatgttctattaaattagctaaaatcaccaaaactttcaaaggtgttttaagtcaggaagcagtgtggtaggtataaagagtggtctggaatgaaagaccaagaatgtgttagtctctctagtatgaatgagtaaaatctttttctaatctccaatcataagaactcctctttgaactttggttcatttttctttattttctttctaaagatgttactaaaagaacaaacaaacaaagaaacaaaaacccaaaaggcaggcctgtcacatgatctccctgatcctcaagtttttcatctttaaaataatgacatgaacctgcttctcttccagggttgtgcaaggaacatgagatatgtgaggtttccttctctgcctattgatcacaatggttgacatgttactctgtgtgtgtgtgtgtgtgtgtgtgtgtgtgtgttataagagaggttagcaaaatgtaagctgttattccgagctattataattactgataccttaaccatgttgcagccatggtcatgttagaagcggaagagcccgggcaaggactggtaatatggcttctctgggtccttaaaacagtcaatggaaagcaatgtttgggaatctcatcacctgtgtgttactcaactgatcaaacattgttaaaatatgctcattctcccacttgatcaacttgcgacctaattagatatttgtgatttattattaagcaacaaaaacaaattactaagcagtttttcagtgcaaatccattaaaaatttatttataagctttagaaaaaagattttaaaaagatgatggatattcaccaaaatgttaactactggcaatctctgggaggaggaatttgcatggcttaaatgtctttctttgtactttttaaaatcacccaaattggacaggattaacatcagaaaaattgacccctcaaggaacacagaggttaagtgctgttagcttttccttttccctaaacacacatgttggtgtcaaatgaagggaaattcaaggtgagagagccaaagcaggccaccggggggtccaagtaaagactttttactgaatgagggtctagaattatttatttattttatttttatttattcattttttttgagatggagtctcgctctgtcccccaggctggagtgcagtggcgcaatctcagctcactgcaagctccgcctcctgggttcatgccattctcctgcctcagcctccccagtagctgggactacaggcgcccaacaccacgcccagctaacttttttgtattttttagtagagatggggtttcaccatgttagtcaggatagtctcgatctcctgacctcatgattcgcccacctcggcatcccaaagtgctgggattacaggtgtgagccaccgcgcccggccgagttatttgttttttaaaatctgtttttcaagagagagtgattgatttctatgtttgtcagtctttcaaccattcatcctgtaatcatttactcacttggtaatcaaagttattgggtggttacgtaggacagaaaaagggcatgaattagctgtccaatgatcagggttcaagttctgctaccatttttctgaagccgtgagccctttgtccatttgagcaacatgaggctcactcatatgtaaagtggggctcatggtgaacatgaaagctctgagaactccacagtgctgggtagagaaggagtttctgtgacatgcaagccactgagctagaaatctgagatagaaagataagccattgatacagcctgtgctctcaagaagcttacacttgactggtctgctggcttaatgctgaatccagcagtatggggcacacaaagaatctcttaggtggaatctaggaatcctgggtttggggtcaatctgagccactgacaggttgtgtgaccatgaaccactcacgttccccctctgactctcggatttctatctgtcccatgaaagaattattaagcctgatgatctccaaggcattttctagcttagacattctatggaatgagtgaaaatcaggcaaaatttgaaacatgttaaaatatccatcatgagcccatatgtgtcatatgctggttcctatttgaagagcaaggacatgggaacattttcggcttgaggcagtactggcattccaagaggcagttcctggctctgtcagtgctgttcttcagctggaagctctgtttctctgcttagcttctgtcacatcatgatagagagagagtcttatcgaagaagactaggaatacacttgtgaatcgtgaataaacatgatgggtattgaatatttgcatgcatttttgtcatgtttattggctgtttctcgaaccttactatgagtctgaatgggggaggcagagagtatgagcagtgggagcccagcatagaaatcctaagttcaaggtttggcaccggctcagcaggtgactatcaaggtgacattcattaattcattcacttgtttacttaatcgggaaccatctatggagcatctactatgtgtgttaggccctgggttagacatttgagatgttaagatgagtagggtgtagtttaccggacggtgtgctttttgaaagcaagtgcctgatccttatttcttcattgcttgaacatggccctgccctgaggagcacataaattagcaaagtctctgggcaagtagtttattttcctagaactcagtgttcattcctccttaagatggttttggaattggacttaatgatctccaaaattccttctagcttggatgttctgttctgcagttacctaatatctcgcaatgagaaaggtttgcgtccagcgatggaggaaaggtcacagaacaatctgcagcaggtgaaatgaaaccgcagagcctccagagagcacatgaaccagtaagtccctcctcacctgagaaggctatgagactaagcctggtctggaaatgcaaataacatgctcgagtacagcaagaacaacagcactggctttgggttttggtgcaacgataggggacccttaaggcagaaatgaggcttacctggtgacatgctggacagtgctgtaccatcccactggttcagaatggaggaaaaacgttgaagctggtcatactctggatagaaaaccagtctctgggctcctgtccctctgccctccccctgctttacctgtgtcaccaaaactctccggggacagcaacacctacctcccatgccaccgtgatgattaaatgtgaaaacacatatgaaaggtcttcgtaaactctaaagtgctttatacatggaaaatagaattaatatctgtggaggagggagaaatagaggggcaccttgaagaatgaataggtgctacgtaagtggagagctgtgtgcctgcctgtcaaggaagtaagcactttataaaagtcaactcataacgtcaggcagggactattattattcccattctacagatgaggaaactgaattccaaaaagtttaagtaacttgatcaaggccacctcgttggtaaatagtaaagtttggactcacaccgaggaagtctggctacaaaatttgtgctcttaaccaatatgctcttctgcctccctcattgaaaaaaaaaatgtttgtaattcaatttgattccaatcaatacatggcttgagtgccagactgggcactggctgtgtaatgatgaagacagtccatgctctccagaagcataagcaaataagaaaatactccaaagaataaggaaataagatactacaaatatgactggcactggaataatgtaaagaagaatgtggaaatggaaaagaggaggagtgttccagtggccgtgcatttaacagagtagagaaccaagcgggtggataaagagcagttcaaggtgaggctgaaaaggtgatgttctggagcctgatggtggagggtccagagtgccaggctaaagtgacagggtgttagcctggagagggtgggcaactgtgaaggattttggatcaggtaaatagtatatcaaaaagagaattttaagagacttaaactaatgaaataggagaaggacgtttatctgggatcagcacagttactctagtctgtggattggtaaagataaataaaggttaatttttcaacttagactcatctgggaaaaaaggggaagaaatttctgggatttggtgcatcattaattctcaaaacgatgaagaatggagatgtggccatagaagatgaagttaacgggaacctcaggagtgaccctcctccgtcccacgcttgacttctttgcttcattgtggtggtggcctggcttctgggaaactcctccagccatggggaattccttgcccagtgaagcagcctgcttttcttggatagcttttatcaccacaatgaggtttttcttttctttcttatttaactacaaatgctcagtcattacattattcaaatctaggaatttcactgcctcagtgtcaccatattggcaatctccaaaggccccaaacctttctttgctgtcagcgagaaaactctgtggggatcaccaggggatggaccagggaggctcaggactgggagatgagacaagcaccctcagaaggcgcagacttagctagattaggaaaaagaggcccagccaggcaggtggcacaagatgttagaggtggaagatatgaaggagttactgcatctgtggccttctcagtggagcccaagaacaagacttcagtagtaaccatgttagtaaagaaataggtgaagtcatgaaaatcacttgtaattcttattaagcatcctttgttcttttcaatgaatgactgaggaaaccttacagatcatttttcaatcagtacccacttggtgccaagaaacgagattcacaaatggagtaaacacagctcttgctgtgatgggcttacatggtagggggcagataaaggggtaagctatatatatatatacacatatatatacacacacacacacacataattgctatatattatacatatatgtagagagatatgctctgcaatgtacacataggaggccaccagtctgtctatgctccatgaggtcaggactatatctctttttattcacaacactatattctcagtgcttagaatgaggcctgacagactctcaatgagtatttattgaatgaataaatgtgtgagtaaatgaataagtaacatctgatctaaaaccagagccagattctttctgaccttcagcctaataatactttacttactataacctggagattcccattttgtaatgtcccctctatgaggcttgtcttaacaggtagatatgaacgaattgaagacacccacaatgccagctattgttttctatggcaacactgcccatctcagtgctggttcctggggcacatgacaagaatatctggttgagtccacaggagacagacctcatgggaagatgacacgatcatgaagcctgctcatctcctctactgtccagtgaacttgggcaaagtcactttaactctttggactttaatttcttgtttattaaacaagtgaatatcacatcggtttcacatagttattaaataatttcattctgggaaagaacttggccttgttgagaaaagatccaaattgaatcatcaggcctctttcctggagccaatcttttcagagcattcagactcaagggttagccctagggagcagctgacatcagaagggtatttgaacctatgaccttttggcttaaaagtaagagttcaactctccccacattttctcttgtgtttcgatgttggccaggggtggctgctgcaccctgtgtacaaacggaaaccccaaattgtgtttgcatctatctggccaaggtaccttccccagctccacctccagatgttccatgggggtttgaagtgggaaggaggagttaacgcaccctagtgtctctctgataggggcaactgtgtgcacccacatgtacgagagatctggggctgggagtgtcccagcctgcttctgtacatgtgggctgacagtgacatgttgctttagccagaaggaaagtgcttctgtaatcacaagagagaggtttccctgtcttctctcaaagagagtttggaggccactagtttttcaccaaactgccaagctttccccatatcagtaatatttcaatgatgtttacaaacttgcccgtctgctctttaatacacagagctatgcattgatggtacatgtgcaaggtctgaccttttcgtaggaaaaaacattcataaccaaagcctatatatagcagcttcagactggagcagaggaagatgtaggtcatctgacttttttgtgtgtgaagcataatgcacgagagacgtggcagacaattgaaaactcatgaaatactgcctctggtctgagccttgctaatatttatcaaaacctttaaacaatgacatagttttcaactgggaattataatgccacctactaaccctgagcataagattttttccacaggggaaatttacttagtttaaaactgtatttcactatgtagttaactcttaactatttcttttaaaggggaaaagaacagttaccatcaaaatttattcagcgaacaagtataatatttaaaataatacgataggtaattgaaaaacatgatttgtgtcacttatcaggctcatcgttacctacataaacataaaccaaattcctcagcattcaaggtgaacatgacctggaggttgcctgcctgtccatcagtctcctcagggtcacttttcatattctgttccactgaaccttgtaccgtttgttccttcctgttcctttgtctttgtctttgcttcccttactctctgttcttgggaaatctttttctggacatctctgtatatccagtctattctgtaatatatgaatcaaatgccatcacctccataaatcctctcttttcttcatttcccaggctgtttgtttttaactagctgaccatagcttgttctgtattataaacttattggtgtccatgtcttatatcccattctgatagactatgaaccttctaagggcaggtcaagagtcatgtctgaggcactttgtacccacatagtgcgtaatactgcagacaatgtacaatacaaaacacctataaaatgcatccctgcaaaatgtttattaagtaaatgaatttggctttggaatatactagtacaaacatagaatatttatcatatggagctactatgctaagcactatcttgtttaatgaccaataaatccatgaaattattattattgtcatcatttttaatagcagaaaaaactaaagctcaaagaagttcaaaacctcaccaatgtcacatagctagcagaacaacagaccaggattcaaacccaggtctatctggcctagtggtgtgctggaagctggcttgttccagtttataagagctaattgtgaaattatcaggaattttgggaactgctggaaaagcacagtcattattaaaaagtaaatcataaaaacataaatcatacaaaaataatggtaataaatactaaaaactcaccacttcctattttttaggacatttcatcattaaatatgctcttgaggttatttgtatttcttgcatttgtatgttagaaatattgtacaatggtgtgctgctgtgtatctcttccaaataccacattcagtgatgttgcattggtggcctgaattcaaccatgatgagaatatttacaccaaggatattggcaaacacaacaaatgagggcttcctcccagaaaggcagttattaaacattaacaagcatgccacagtccagccccagaactggactgtacttcagaaagaaacaggctttggcccaagcacacatggacatctccatttccagccttagtctgcacttggtagggcctacctttggaccatcacagataagttgctttctcagaatagaaaattgactttcacaaggctcctttgagcctcggggttggagtgaaagtaattcttagtggttattttatgcctataaaatatatcctaaacctctaccacaaatttagttatgctcttgatcataatcatatacccaggaatatataatgtagctcttgtaacattgaaattccaaaatatggatataaatgtatttccccaaatttatattaatatcataacctactgtttttaagctatatctccttagacccttgatttcatatacatagtttccacatcgtataccttctatgtctcatgaaatgaaatctgagttttgaatcagaggttgtgaatttcagtgctgttctttaactcaagagcaggtcagataacattgttaaccacatgtcaactagcacgttccattgctaattaacagttttctcatctttccaatgaggagttcggcctagatgtcatcttttgaagaccattctggttctatttctaaatgatactgcatgttgcttctcttccttagggctcagtttctgtatctaaacaacagggggttgaaccaggtagctcctaaagtccttttcagctccataaacttgtgaattc
